(19) United States
(12) Patent Application Publication
(10) Pub. No.: US 2025/0027098 A1
(43) Pub. Date: Jan. 23, 2025

(54) METHOD FOR SELECTING TARGET SITES FOR SITE-SPECIFIC GENOME MODIFICATION IN PLANTS

(71) Applicant: Monsanto Technology LLC, St. Louis, MO (US)

(72) Inventors: Brent BROWER-TOLAND, St. Louis, MO (US); Paul S. CHOMET, St. Louis, MO (US); Robert T. GAETA, Chesterfield, MO (US); Andrei Y. KOURANOV, Chesterfield, MO (US); Jonathan C. LAMB, Wildwood, MO (US); Richard J. LAWRENCE, Kirkwood, MO (US); Ruth WAGNER, Chesterfield, MO (US)

(73) Assignee: Monsanto Technology LLC, St. Louis, MO (US)

(21) Appl. No.: 18/908,523

(22) Filed: Oct. 7, 2024

Related U.S. Application Data
(63) Continuation of application No. 16/338,335, filed on Mar. 29, 2019.
(60) Provisional application No. 62/402,724, filed on Sep. 30, 2016.

(51) Int. Cl. C12N 15/82

(52) U.S. Cl. CPC C12N 15/8213; C12N 15/8261

(57) ABSTRACT

The present disclosure provides methods and compositions for identification of optimal genomic loci in plant genome for site-directed integration in plants.

### CROSS-REFERENCE TO RELATED APPLICATION

[0001] This application is a continuation of U.S. application Ser. No. 16/338,335, filed internationally on Sep. 29, 2017, which is a national stage application under 35 U.S.C. § 371 of International Application No. PCT/U52017/054378, filed on Sep. 29, 2017, which claims priority to U.S. Provisional Application No. 62/402,724, filed on Sep. 30, 2016,each of which is incorporated herein by reference in its entirety.

### REFERENCE TO AN ELECTRON SEQUENCE LISTING FIELD

[0002] The contents of the electronic sequence listing (777052057701SEQLIST.xml; Size: 1,289,294 bytes; and Date of Creation: Oct. 3, 2024) is herein incorporated by reference in its entirety.

### FIELD

[0003] The present disclosure provides methods for selecting target sites for site-specific genome modification in plant genomes.

### BACKGROUND

[0004] Site-specific genome modification in plant genomes provides a means to develop plants with specific traits and to facilitate plant breeding programs. For the development of new agronomic traits, site-specific genome modification enzymes are used for site-specific genome editing, and for site-specific targeted integration of a DNA of interest. Site-specific transgene integration in a plant genome provides significant improvement over random integration of a transgene in the development of new traits.

[0005] There is a need to develop methods for identification of target sites for site-specific genome modification in a plant genome. The present disclosure describes a target site selection process to identify genomic regions that are suitable as target sites of site-specific genome modification enzymes. The process includes bioinformatics analysis of intron and exon gene structure, non-coding RNA sequence, small RNA sequence, sequence redundancy and chromatin modification consensus sequence sites. Additional information is agronomic data tied to haplotype windows to guide selection of specific target sites for integration of DNA of interest in a given plant. Site-specific integration of DNA of interest will reduce development costs and increase optimal agronomic trait development in the site-specific modified plant genome.

### BRIEF SUMMARY

[0006] Several embodiments relate to a recombinant sequence comprising a non-genic plant genomic sequence and a DNA of interest. In some embodiments, the DNA of interest is integrated into a target site in the non-genic plant genomic sequence. In some embodiments, the target site is located in a haplotype window associated with a neutral to positive impact on one or more agronomic traits. In some embodiments, the target site is further located at genetic distance greater than 1 cM of a haplotype window that is associated with a negative impact on one or more agronomic traits. In some embodiments, the target site is located within a small genomic region (less than 1000 bp) of low genetic diversity, where the low genetic diversity is defined as having from one to ten distinguishable haplotypes across all germplasm in the intended heterotic group, the intended maturity group, or the intended heterotic and maturity group. In some embodiments, the haplotype window is based on physical distance. In some embodiments, the physical distance comprises between 40 base pairs and the full length of the chromosome, with at least 99% sequence similarity across the targeted germplasm and contains two or fewer indels of transposon size (˜3 kb). In some embodiments, the haplotype window is defined by genetic distance. In some embodiments, the genetic distance is 0.1 cM, 0.5 cM, 1 cM, 2 cM, 3 cM, 4 cM, or 5 cM. In some embodiments, the agronomic trait is one or more selected from the group consisting of: yield, car relative maturity, car height, car number, increased car size, grain moisture, increased car dry weight per plant, increased number of kernels per ear, increased weight per kernel, increased number of kernels per plant, decreased car void, extended grain fill period, test weight, pod number, number of seed per pod, pod position on the plant, number of internodes, incidence of pod shatter, grain size, decreased days from planting to maturity, increased stalk size, increased number of leaves, increased plant height growth rate in vegetative stage, plant architecture, resistance to lodging, percent seed germination, seedling vigor, juvenile traits, efficiency of germination (including germination in stressed conditions), growth rate (including growth rate in stressed conditions), increased number of root branches, increased total root length, efficiency of nodulation and nitrogen fixation, enhanced nitrogen use efficiency, increased water use efficiency as compared to a control plant, efficiency of nutrient assimilation, resistance to biotic and abiotic stress, carbon assimilation, physiology, enhanced disease or pest resistance, or environmental or chemical tolerance, enhanced cold tolerance, nutritional enhancement, enhanced seed protein, enhanced seed starch, enhanced seed oil, plant height, enhanced plant morphology, growth and development, and stay green rating. In some embodiments, the non-genic plant genomic sequence is a corn genomic sequence or a soybean genomic sequence. In some embodiments, the corn genomic sequence is selected from the group consisting of SEQ ID NOs: 123-172, 294, 299-551, 555 and 556. In some embodiments, the corn genomic sequence is a B Chromosome sequence selected from the group consisting of SEQ ID NO:300-551. In some embodiments, the soybean genomic sequence is selected from the group consisting of SEQ ID NOs: 251-282, 554. In some embodiments, the target site comprises at least 75, at least 80, at least 90, at least 100, at least 200, at least 300, at least 400, at least 500, at least 600, at least 700, at least 800, at least 900, or at least 1000 nucleotides. In some embodiments, the DNA of interest comprises a gene expression cassette comprising a sequence selected from an insecticidal resistance gene, a herbicide tolerance gene, a nitrogen use efficiency gene, a water use efficiency gene, a nutritional quality gene, a DNA binding gene, a selectable marker gene, a target site for a site-specific genome modification enzyme, a recombinase target site, and any combination thereof. In some embodiments, the target site comprises one or more of the criteria selected from the group consisting of: (i) the target site is located greater than 2 kb from a 5′ or a 3′ end of a gene in the plant genome; (ii) the target site is located more than 1 kb from a 5′ or a 3′ end of a repeat region in the plant genome, and wherein the repeat region is at least 2 kb in length; (iii) the target site is located more than 1 kb from a 5′ or a 3′ end of a repressive chromatin mark in the plant genome; (iv) the target site is located more than 200 bases from a small RNA (sRNA) hotspot in the plant genome, and wherein the sRNA hotspot is a sequence from 0.2 to 1 kb in length; (v) the target site is within a region of the plant genome of low DNA methylation; (vi) the target site is not within a region of the plant genome associated with at least one DNA methylation read containing an MspJi motif or a LpnPI motif; or (vii) the target site is within a region of the plant genome that exhibits a total k-mer redundancy score of less than or equal to 30%. In some embodiments, the target site comprises one or more of the criteria selected from the group consisting of: (i) the target site is located greater than 2 kb from a 5′ or a 3′ end of a gene in the plant genome; (ii) the target site is located more than 1 kb from a 5′ or a 3′ end of a repeat region in the plant genome, and wherein the repeat region is at least 2 kb in length; (iii) the target site is located more than 1 kb from a 5′ or a 3′ end of a repressive chromatin mark in the plant genome; (iv) the target site is located more than 200 bases from a small RNA (sRNA) hotspot in the plant genome, and wherein the sRNA hotspot is a sequence from 0.2 to 1 kb in length; (v) the target site is within a 100 bp, 150 bp, 200 bp, 250 bp, 300 bp, 350 bp, 400 bp, 500 bp, 550 bp, 600 bp, 650 bp, 700 bp, 750 bp, 800 bp, 850 bp, 900 bp, 950 bp, or 1,000 bp region of the plant genome of low DNA methylation; (vi) the target site is not within a 100 bp, 150 bp, 200 bp, 250 bp, 300 bp, 350 bp, 400 bp, 500 bp, 550 bp, 600 bp, 650 bp, 700 bp, 750 bp, 800 bp, 850 bp, 900 bp, 950 bp, or 1,000 bp region of the plant genome associated with at least one DNA methylation read containing an MspJi motif or a LpnPI motif; or (vii) the target site is within a 100 bp, 150 bp, 200 bp, 250 bp, 300 bp, 350 bp, 400 bp, 500 bp, 550 bp, 600 bp, 650 bp, 700 bp, 750 bp, 800 bp, 850 bp, 900 bp, 950 bp, or 1,000 bp region of the plant genome that exhibits a total redundancy score of less than or equal to 35%, 34%, 33%, 32%, 31%, 30%, 25%, 20%, 15%, 10% or 5%. In some embodiments, the recombinant nucleic acid is present in a plant, plant cell, or plant part.

[0007] Several embodiments relate to a method of making a transgenic plant cell comprising a DNA of interest targeted to at least one non-genic plant genomic sequence, the method comprising: (i) selecting a target site located within a haplotype window associated with a neutral to positive impact on one or more agronomic traits; (ii) introducing a site-specific genome modification enzyme into a plant cell, wherein the site-specific genome modification enzyme cleaves the target site in the non-genic plant genomic sequence; (iii) introducing a DNA of interest; (iv) targeting the DNA of interest to the target site, wherein the cleavage of the target site facilitates integration of the DNA of interest into the non-genic plant genomic sequence; and (v) selecting transgenic cells comprising the DNA of interest integrated into the non-genic plant genomic sequence. In some embodiments, the method of making a transgenic plant cell comprising a DNA of interest targeted to at least one non-genic plant genomic sequence the method comprising: (i) selecting a target site located within a haplotype window associated with a neutral to positive impact on one or more agronomic traits and where the target site is located at a genetic distance of greater than 10 cM of a haplotype window that is associated with a negative impact on one or more agronomic traits; (ii) introducing a site-specific genome modification enzyme into a plant cell, wherein the site-specific genome modification enzyme cleaves the target site in the non-genic plant genomic sequence; (iii) introducing a DNA of interest; (iv) targeting the DNA of interest to the target site, wherein the cleavage of the target site facilitates integration of the DNA of interest into the non-genic plant genomic sequence; and (v) selecting transgenic cells comprising the DNA of interest integrated into the non-genic plant genomic sequence. In some embodiments, the method of making a transgenic plant cell comprising a DNA of interest targeted to at least one non-genic plant genomic sequence the method comprising: (i) selecting a target site located within a haplotype window associated with a neutral to positive impact on one or more agronomic traits and where the target site is located at a genetic distance of greater than 10 cM of a haplotype window that is associated with a negative impact on one or more agronomic traits; (ii) selecting a haplotype window where the genetic distance is 0.1 cM, 0.5 CM, 1 cM, 2 CM, 3 cM, 4 cM, or 5 cM; (iii) introducing a site-specific genome modification enzyme into a plant cell, wherein the site-specific genome modification enzyme cleaves the target site in the non-genic plant genomic sequence; (iv) introducing a DNA of interest; (v) targeting the DNA of interest to the target site, wherein the cleavage of the target site facilitates integration of the DNA of interest into the non-genic plant genomic sequence; and (vi) selecting transgenic cells comprising the DNA of interest integrated into the non-genic plant genomic sequence. In some embodiments, the agronomic trait is one or more selected from the group consisting of: yield, car relative maturity, car height, car number, increased car size, grain moisture, increased car dry weight per plant, increased number of kernels per ear, increased weight per kernel, increased number of kernels per plant, decreased ear void, extended grain fill period, test weight, pod number, number of seed per pod, pod position on the plant, number of internodes, incidence of pod shatter, grain size, decreased days from planting to maturity, increased stalk size, increased number of leaves, increased plant height growth rate in vegetative stage, plant architecture, resistance to lodging, percent seed germination, seedling vigor, juvenile traits, efficiency of germination (including germination in stressed conditions), growth rate (including growth rate in stressed conditions), increased number of root branches, increased total root length, efficiency of nodulation and nitrogen fixation, enhanced nitrogen use efficiency, increased water use efficiency as compared to a control plant, efficiency of nutrient assimilation, resistance to biotic and abiotic stress, carbon assimilation, physiology, enhanced disease or pest resistance, or environmental or chemical tolerance, enhanced cold tolerance, nutritional enhancement, enhanced seed protein, enhanced seed starch, enhanced seed oil, plant height, enhanced plant morphology, growth and development, and stay green rating. In some embodiments, the non-genic plant sequence is a soybean genomic sequence or a corn genomic sequence. In some embodiments, the corn genomic sequence is selected from the group consisting of SEQ ID NOs 123-172, 294, 299-551, 555 and 556. In some embodiments, the corn genomic sequence is a B Chromosome sequence selected from the group consisting of SEQ ID NO:300-551. In some embodiments, the soybean genomic sequence is selected from the group consisting of SEQ ID NOs: 251-282. In some embodiments, the target site comprises one or more of the criteria selected from the group consisting of: (i) the target site is located greater than 2 kb from a 5′ or a 3′ end of a gene in the plant genome; (ii) the target site is located more than 1 kb from a 5′ or a 3′ end of a repeat region in the plant genome, and wherein the repeat region is at least 2 kb in length; (iii) the target site is located more than 1 kb from a 5′ or a 3′ end of a repressive chromatin mark in the plant genome; (iv) the target site is located more than 200 bases from a small RNA (sRNA) hotspot in the plant genome, and wherein the sRNA hotspot is a sequence from 0.2 to 1 kb in length; (v) the target site is within a region of the plant genome of low DNA methylation; (vi) the target site is not within a region of the plant genome associated with at least one DNA methylation read containing an MspJi motif or a LpnPI motif; or (vii) the target site is within a region of the plant genome that exhibits a total k-mer redundancy score of less than or equal to 30%. In some embodiments, the target site comprises one or more of the criteria selected from the group consisting of: (i) the target site is located greater than 2 kb from a 5′ or a 3′ end of a gene in the plant genome; (ii) the target site is located more than 1 kb from a 5′ or a 3′ end of a repeat region in the plant genome, and wherein the repeat region is at least 2 kb in length; (iii) the target site is located more than 1 kb from a 5′ or a 3′ end of a repressive chromatin mark in the plant genome; (iv) the target site is located more than 50 bp, 100 bp, 150 bp, 200 bp, 250 bp, 300 bp, from a small RNA (sRNA) hotspot in the plant genome, and wherein the sRNA hotspot is a sequence from 0.2 to 1 kb in length; (v) the target site is within a 50 bp, 100 bp, 150 bp, 200 bp, 250 bp, 300 bp, 350 bp, 400 bp, 500 bp, 550 bp, 600 bp, 650 bp, 700 bp, 750 bp, 800 bp, 850 bp, 900 bp, 950 bp, or 1,000 bp region of the plant genome of low DNA methylation; (vi) the target site is not within a 100 bp, 150 bp, 200 bp, 250 bp, 300 bp, 350 bp, 400 bp, 500 bp, 550 bp, 600 bp, 650 bp, 700 bp, 750 bp, 800 bp, 850 bp, 900 bp, 950 bp, or 1,000 bp region of the plant genome associated with at least one DNA methylation read containing an MspJi motif or a LpnPI motif;

[0008] or (vii) the target site is within a 100 bp, 150 bp, 200 bp, 250 bp, 300 bp, 350 bp, 400 bp, 500 bp, 550 bp, 600 bp, 650 bp, 700 bp, 750 bp, 800 bp, 850 bp, 900 bp, 950 bp, or 1,000 bp region of the plant genome that exhibits a redundancy score of less than or equal to 35%, 34%, 33%, 32%, 31%, 30%, 25%, 20%, 15%, 10% or 5%. In some embodiments, the target site comprises at least 75, at least 80, at least 90, at least 100, at least 200, at least 300, at least 400, at least 500, at least 600, at least 700, at least 800, at least 900, at least 1000 nucleotides. In some embodiments, the DNA of interest comprises a gene expression cassette comprising a sequence selected from an insecticidal resistance gene, a herbicide tolerance gene, a nitrogen use efficiency gene, a water use efficiency gene, a nutritional quality gene, a DNA binding gene, a selectable marker gene, and any combination thereof. In some embodiments, the site-specific genome modification enzyme is selected from an endonuclease, a recombinase, a transposase, and any combination thereof. In some embodiments, the endonuclease is selected from a meganuclease, a zinc finger nuclease, a transcription activator-like effector nuclease (TALEN), a Cas9 nuclease, a Cpf1 nuclease, a Cas12a nuclease, a Cas12e nuclease, a CasX nuclease, a Cas 12d nuclease, a CasY nuclease, a Cas12b nuclease, a C2C1 nuclease, a Cas12c nuclease, a C2C3 nuclease, a C2C4 nuclease, a C2C5 nuclease, a C2C6 nuclease, a C2C7 nuclease, a C2C8 nuclease, a C2C9 nuclease, a C2C10 nuclease, a Cas13a nuclease, a Cas13b nuclease, and a Cas13c nuclease. In some embodiments, the recombinase is a tyrosine recombinase attached to a DNA recognition motif, or a serine recombinase attached to a DNA recognition motif. In some embodiments, the tyrosine recombinase attached to a DNA recognition motif is selected from the group consisting of a Cre recombinase, a Flp recombinase, and a Tnp1 recombinase. In some embodiments, the serine recombinase attached to a DNA recognition motif is selected from the group consisting of a PhiC31 integrase, an R4 integrase, and a TP-901 integrase. In some embodiments, the transposase is a DNA transposase attached to a DNA binding domain. In some embodiments, transcription activator-like effector nuclease (TALEN) DNA binding site within the target site of corn genomic sequence is selected from the SEQ ID NOs presented in Table 1. In some embodiments, the transcription activator-like effector nuclease (TALEN) DNA binding site within the target site of soybean genomic sequence is selected from the SEQ ID NOs presented in Table 2. In some embodiments, the DNA of interest is an exogenous sequence. In some embodiments, the DNA of interest comprises one or more transgenes. In some embodiments, the DNA of interest is integrated into the target site via a non-homologous end joining. In some embodiments, the DNA of interest is integrated into the target site via a homologous recombination. In some embodiments, the recombinant nucleic acid is present in a plant, plant cell, or plant part.

### BRIEF DESCRIPTION OF THE DRAWINGS

[0009] FIG. 1 is a general work flow diagram illustrating one embodiment of steps in the method of site selection for targeted integration.

[0010] FIG. 2 illustrates a screen shot sample of a Genome Browser output for a 10 kb region of chromosome 1 (CR01) of the corn B73 reference genome from position 287440 kb to 287449 kb. Relative redundancy scores (horizontal line marked “Zm.B73Redundancy score”) are illustrated by vertical bars, with the region between 278446 kb and 287449 kb having high redundancy. An exon for the endogenous gene GRMZM2G138382 is illustrated by a gray horizontal bar from 287440 kb to approximately 287442 kb. The horizontal arrow labeled “2 kb” shows the distance to the 5′-end of SEQ ID NO:299. MspJI methylation consensus sites are illustrated by vertical bars on the horizontal line labeled “Methylation by MspJI”. Repeat regions are indicated by horizontal black bars with several positioned between 287287444.5 kb-287449 kb. The horizontal arrow labeled “1 kb” shows the distance to the 3′-end of SEQ ID NO:299. H3K27me3 methylation consensus sequence region is indicated by vertical bars on the horizontal line labeled “H3K27me3 peak”, with a double peak region positioned at 287441.3kb to 287442.3kb. The position of SEQ ID NO: 130 is illustrated by the horizontal line at the top and is positioned approximately from 287442.7 kb to 287445.9 kb. SEQ ID NO:130 is a sequence region about 3.4 kb in length representing at least 4 specific TALEN target sites. A region encompassing a TALEN specific target site, represented by SEQ ID: 294, is within the region represented by SEQ ID NO: 130 and SEQ ID NO:299. The position of SEQ ID NO: 299 is illustrated by the horizontal line at the top and is positioned approximately from 287444 kb to 287445.9 kb. The position of SEQ ID NO: 294 is illustrated by the horizontal line at the bottom and is positioned approximately from 287444 kb to 287445.9 kb. The vertical thick arrow on the horizontal line representing MspJI sites illustrates the position of the TALEN binding sites (SEQ ID NO:35 and SEQ ID NO:94) for the TALEN target site represented by SEQ ID NO:294.

[0011] FIG. 3 illustrates an enlarged region of chromosome 1 (CR01) of the corn B73 reference genome from FIG. 2 corresponding to the region of nucleotide 287442700kb to 287226211kb. Additionally, the MspJI DNA methylation profile calculated for this region is plotted as vertical bars, with relative counts of 0 to 6 (Y-axis). The nucleotide region of each of SEQ ID NO:130, SEQ ID NO:299, and SEQ ID NO:294 are indicated by the horizontal double-arrow lines. The nucleotide position selected for TALEN binding sites (SEQ ID NO:35 and SEQ ID NO:94) and TALEN induced double-strand break (DSB) is illustrated by the thick, black horizontal line.

[0012] FIG. 4 provides a graph comparing the percent integration of donor polynucleotides into seven sites on the corn genome LH244. Histograms show the percent integration of nucleotides into the corn genome at seven sites, SEQ ID NOs: 32/91, 33/92,34/93, 35/94, 295/296, 297/298, and 304/305 along with the percent integration for the negative controls corresponding to each site. Error bars represent Standard Deviation. Double asterisks (**) identify sites with significantly different (p>0.05) integration frequencies than their negative controls. The panel below indicates DNA methylation status of each targeted region in the genome where “+” indicates methylated and “−” indicates non-methylated regions. The methylated regions were identified by genome-wide MspJI/LpnPI sequencing as described in this application.

[0013] FIG. 5 illustrates a 9.6 kb region of chromosome 2 (CR02) of the soy Williams 82 reference genome from position 49329900 kb to 49339882 kb. This region is represented by SEQ ID NO:257. The Y-axis shows both the redundancy scores (k-mer) and the MspJI methylation profile along the length of the sequence (X-axis). The box at position 493353399 kb to 493363399 kb is expanded in FIG. 6, and is the region of TALEN target site selection.

[0014] FIG. 6 illustrates a 1 kb nucleotide region (SEQ ID NO:554) of the graph from FIG. 5, from position 49335399 kb to 49336386 kb. At the expanded scale, a region of relative low redundancy score and a relatively low methylation profile is identified as a region for site-specific genome modification (horizontal bar).

### DETAILED DESCRIPTION

[0015] Unless defined otherwise, all technical and scientific terms used have the same meaning as commonly understood by one of ordinary skill in the art to which this disclosure belongs. Where a term is provided in the singular, the inventors also contemplate aspects of the disclosure described by the plural of that term. Where there are discrepancies in terms and definitions used in references that are incorporated by reference, the terms used in this application shall have the definitions given herein. Other technical terms used have their ordinary meaning in the art in which they are used, as exemplified by various art-specific dictionaries, for example, “The American Heritage® Science Dictionary” (Editors of the American Heritage Dictionaries, 2011, Houghton Mifflin Harcourt, Boston and New York), the “McGraw-Hill Dictionary of Scientific and Technical Terms” (6th edition, 2002, McGraw-Hill, New York), or the “Oxford Dictionary of Biology” (6th edition, 2008, Oxford University Press, Oxford and New York). The inventors do not intend to be limited to a mechanism or mode of action. Reference thereto is provided for illustrative purposes only.

[0016] The practice of the present disclosure employs, unless otherwise indicated, conventional techniques of biochemistry, chemistry, molecular biology, microbiology, cell biology, genomics, plant breeding, and biotechnology, which are within the skill of the art. See Green and Sambrook, MOLECULAR CLONING: A LABORATORY MANUAL, 4th edition (2012); CURRENT PROTOCOLS IN MOLECULAR BIOLOGY (F. M. Ausubel, et al. eds., (1987)); the series METHODS IN ENZYMOLOGY (Academic Press, Inc.): PCR 2: A PRACTICAL APPROACH (M. J. MacPherson, B. D. Hames and G. R. Taylor eds. (1995)); Harlow and Lane, eds. (1988) ANTIBODIES, A LABORATORY MANUAL; ANIMAL CELL CULTURE (R. I. Freshney, ed. (1987)); RECOMBINANT PROTEIN PURIFICATION: PRINCIPLES AND METHODS, 18-1142-75, GE Healthcare Life Sciences; C. N. Stewart, A. Touracv, V. Citovsky, T. Tzfira eds. (2011) Plant Transformation Technologies (Wiley-Blackwell); and R. H. Smith (2013) PLANT TISSUE CULTURE. TECHNIQUES AND EXPERIMENTS (Academic Press, Inc.).

[0017] Any references cited herein are incorporated by reference in their entireties.

[0018] As used herein, the singular form “a,” “an,” and “the” include plural references unless the context clearly dictates otherwise. Thus, for example, reference to “plant,” “the plant,” or “a plant” also includes a plurality of plants; also, depending on the context, use of the term “plant” can also include genetically similar or identical progeny of that plant; use of the term “a nucleic acid” optionally includes, as a practical matter, many copies of that nucleic acid molecule; similarly, the term “probe” optionally (and typically) encompasses many similar or identical probe molecules.

[0019] As used herein, the term “about” indicates that a value includes the inherent variation of error for the method being employed to determine a value, or the variation that exists among experiments.

[0020] As used herein, the term “plant” includes a whole plant and any progeny, cell, tissue, or part of a plant. A progeny plant can be from any filial generation, e.g., F₁, F₂, F₃, F₄, F₅, F₆, F₇, etc. The term “plant parts” include any part(s) of a plant, including, for example and without limitation: seed (including mature seed and immature seed); a plant cutting; a plant cell; a plant cell culture; a plant protoplast; a plant organ (e.g., pollen, embryos, flowers, fruits, shoots, leaves, roots, stems, and explants). A plant tissue or plant organ may be a seed, callus, or any other group of plant cells that is organized into a structural or functional unit. A plant cell or tissue culture may be capable of regenerating a plant having the physiological and morphological characteristics of the plant from which the cell or tissue was obtained, and of regenerating a plant having substantially the same genotype as the donor plant. In contrast, some plant cells are not capable of being regenerated to produce plants. Regenerable cells in a plant cell or tissue culture may be embryos, protoplasts, meristematic cells, callus, pollen, leaves, anthers, roots, root tips, silk, flowers, kernels, cars, cobs, husks, or stalks.

[0021] Plant parts include harvestable parts and parts useful for propagation of progeny plants. Plant parts useful for propagation include, for example and without limitation: seed; fruit; a cutting; a seedling; a tuber; and a rootstock. A harvestable part of a plant may be any useful part of a plant, including, for example and without limitation: flower; pollen; seedling; tuber; leaf; stem; fruit; seed; and root.

[0022] A plant cell is the structural and physiological unit of the plant. Plant cells, as used herein, includes protoplasts and protoplasts with a cell wall. A plant cell may be in the form of an isolated single cell, or an aggregate of cells (e.g., a friable callus and a cultured cell), and may be part of a higher organized unit (e.g., a plant tissue, plant organ, and plant). Thus, a plant cell may be a protoplast, a gamete producing cell, or a cell or collection of cells that can regenerate into a whole plant.

[0023] As used herein, the term “plant genome” refers to a nuclear genome, a mitochondrial genome, or a plastid (e.g., chloroplast) genome of a plant cell.

[0024] As used herein, the term “corn” refers to Zea mays or maize and includes all plant varieties that can be bred with corn, including wild maize species.

[0025] As used herein, the term “soybean” refers to Glycine max and includes all plant varieties that can be bred with soybean, including wild soybean species.

[0026] As used herein, the term “haplotype” refers to a chromosomal region within a haplotype window defined by at least one polymorphic marker. The unique marker fingerprint combinations in each haplotype window define individual haplotypes for that window. Further, changes in a haplotype, brought about by recombination for example, may result in the modification of a haplotype so that it comprises only a portion of the original (parental) haplotype operably linked to the trait, for example, via physical linkage to a gene, QTL, or transgene. Any such change in a haplotype would be included in our definition of what constitutes a haplotype so long as the functional integrity of that genomic region is unchanged or improved.

[0027] As used herein, the term “haplotype window” refers to a chromosomal region that is established by statistical analyses known to those of skill in the art and is in linkage disequilibrium. Thus, identity by state between two inbred individuals (or two gametes) at one or more marker loci located within this region is taken as evidence of identity-by-descent of the entire region. Each haplotype window includes at least one polymorphic marker. Haplotype windows are mapped along cach chromosome in the genome.

[0028] As used herein, the term “polymorphic marker” refers to a polymorphic nucleic acid sequence or nucleic acid feature. A “polymorphism” is a variation among individuals in sequence, particularly in DNA sequence, or feature, such as a transcriptional profile or methylation pattern. Useful polymorphisms include single nucleotide polymorphisms (SNPs), insertions or deletions in DNA sequence (Indels), simple sequence repeats of DNA sequence (SSRs) a restriction fragment length polymorphism, a haplotype, and a tag SNP. A genetic marker, a gene, a DNA-derived sequence, a RNA-derived sequence, a promoter, a 5′ untranslated region of a gene, a 3′ untranslated region of a gene, microRNA, siRNA, a QTL, a satellite marker, a transgene, mRNA, ds mRNA, a transcriptional profile, and a methylation pattern may comprise polymorphisms. A polymorphism may arise from random processes in nucleic acid replication, through mutagenesis, as a result of mobile genomic elements, from copy number variation and during the process of meiosis, such as unequal crossing over, genome duplication and chromosome breaks and fusions. The variation can be commonly found or may exist at low frequency within a population, the former having greater utility in general plant breeding and the latter may be associated with rare but important phenotypic variation.

[0029] In one aspect, a “polymorphic marker” can be a detectable characteristic that can be used to discriminate between heritable differences between organisms. Examples of such characteristics may include genetic markers, protein composition, protein levels, oil composition, oil levels, carbohydrate composition, carbohydrate levels, fatty acid composition, fatty acid levels, amino acid composition, amino acid levels, biopolymers, pharmaceuticals, starch composition, starch levels, fermentable starch, fermentation yield, fermentation efficiency, energy yield, secondary compounds, metabolites, morphological characteristics, and agronomic characteristics.

[0030] As used herein, the term “polynucleotide” refers to a nucleic acid molecule containing multiple nucleotides and generally comprises at least 2, at least 5, at least 10, at least 20, at least 30, at least 40, at least 50, at least 100, at least 250, at least 500, at least 1000, at least 1500, at least 2000, at least 2500, at least 3000, at least 5000, or at least 10,000 nucleotide bases. As an example, a polynucleotide provided herein can be a plasmid. A specific polynucleotide of 18-25 nucleotides in length may be referred to as an “oligonucleotide”. Nucleic acid molecules provided herein include deoxyribonucleic acids (DNA) and ribonucleic acids (RNA) and functional analogues thereof, such as complementary DNA (cDNA). Nucleic acid molecules provided herein can be single stranded or double stranded. Nucleic acid molecules comprise the nucleotide bases adenine (A), guanine (G), thymine (T), cytosine (C). Uracil (U) replaces thymine in RNA molecules. The symbol “N” can be used to represent any nucleotide base (e.g., A, G, C, T, or U). The symbol “K” can be used to represent a G or a T/U nucleotide base.

[0031] As used herein, the term “genic region” or “genic sequence” refers to a polynucleotide sequence that comprises an open reading frame encoding at least one RNA and/or polypeptide. The genic region may also encompass any identifiable adjacent 5′ and 3′ non-coding nucleotide sequences involved in the regulation of expression of the open reading frame up to about 2 Kb upstream of the coding region and 1 Kb downstream of the coding region, but possibly further upstream or downstream. A genic region further includes any introns that may be present in the genic region. Further, the genic region may comprise a single gene sequence, or multiple gene sequences interspersed with short spans (less than 1 Kb) of non-genic sequences.

[0032] As used herein, the term “non-genic plant genomic sequence” or “non-genic plant sequence” or “intergenic sequence” or “intergenic region” refers to a native DNA sequence found in the genome of a plant, devoid of any open reading frames, gene sequences, or gene regulatory sequences. Furthermore, the non-genic sequence does not comprise any intron sequence (specifically, introns are excluded from the definition of non-genic). The non-genic sequence cannot be transcribed or translated into protein.

[0033] As used herein, the term “recombination” refers to the exchange of nucleotides between two nucleic acid molecules. The term “homologous recombination” (HR) refers to the exchange of nucleotides at a conserved region shared by two nucleic acid molecules. Homologous recombination HR includes symmetric homologous recombination and asymmetric homologous recombination. Asymmetric homologous recombination can also mean unequal recombination. As used herein, “non-homologous end joining” (NHEJ) refers to the ligation of two ends of double-stranded DNA without the need of a homologous sequence to direct the ligation. Methods for detecting recombination include, but are not limited to, 1) phenotypic screening, 2) molecular marker technologies such as single nucleotide polymorphism-SNP analysis by TaqMan® or Illumina/Infinium technology, 3) Southern blot, 4) PCR, and 4) sequencing.

[0034] As used herein, the terms “targeted insertion” and “targeted integration” are used interchangeably.

[0035] As used herein, the term “donor sequence” “donor DNA” or “DNA of interest” refers to a nucleic acid/DNA sequence that has been selected for targeted insertion into a host sequence. In one aspect, the host sequence is a plant genomic sequence. A donor sequence can be of any length, for example between 2 and 50,000 nucleotides in length (or any integer value therebetween). In some embodiments, a donor sequence is between about 1,000 and 5,000 nucleotides in length (or any integer value therebetween). In some embodiments, a donor sequence is between about 5,000 and 10,000 nucleotides in length (or any integer value therebetween). In some embodiments, a donor sequence is between about 10,000 and 15,000 nucleotides in length (or any integer value therebetween). In some embodiments, a donor sequence is between about 15,000 and 20,000 nucleotides in length (or any integer value therebetween). In some embodiments, a donor sequence is between about 20,000 and 25,000 nucleotides in length (or any integer value therebetween). In some embodiments, a donor sequence is between about 25,000 and 30,000 nucleotides in length (or any integer value therebetween). In some embodiments, a donor sequence is between about 30,000 and 35,000 nucleotides in length (or any integer value therebetween). In some embodiments, a donor sequence is between about 35,000 and 40,000 nucleotides in length (or any integer value therebetween). In some embodiments, a donor sequence is between about 40,000 and 45,000 nucleotides in length (or any integer value therebetween). In some embodiments, a donor sequence is between about 45,000 and 50,000 nucleotides in length (or any integer value therebetween). A donor sequence may comprise one or more gene expression cassettes that further comprise actively transcribed and/or translated gene sequences. Conversely, the donor sequence may comprise a polynucleotide sequence which does not comprise a functional gene expression cassette or an entire gene (e.g., may simply comprise regulatory sequences such as a promoter), or may not contain any identifiable gene expression elements or any actively transcribed gene sequence. Further, the donor sequence can be DNA or RNA, can be linear or circular, and can be single-stranded or double-stranded. It can be delivered to the cell as naked nucleic acid, as a complex with one or more delivery agents (e.g., liposomes, poloxamers, T-strand encapsulated with proteins, etc.,) or contained in a bacterial or viral delivery vehicle, such as, for example, Agrobacterium tumefaciens or an adenovirus or a Gemini Virus, or a nanovirus, respectively.

[0036] As used herein, the term “host sequence” or “host polynucleotide” refers to a polynucleotide sequence in a host plant genome. The term “target site,” as used herein, refers to a polynucleotide sequence that is sufficiently unique in a plant genome to allow targeted genome modification by a site-specific genome modification enzyme. In one aspect, the sequence of the target site is changed from the wild-type sequence, namely the target site is edited. In another aspect, the target site is the site of insertion of a DNA of interest into one specific sequence. In one aspect, the target site is located within a small genomic region (e.g., less than 1500 bp, less than 1000 bp, less than 900 bp, less than 950 bp, less than 850 bp, less than 800 bp, less than 750 bp, less than 700 bp, less than 650 bp, less than 600 bp, less than 550 bp, less than 500 bp, less than 450 bp, less than 400 bp, less than 350 bp, less than 300 bp, less than 250 bp, less than 200 bp, less than 150 bp, less than 100 bp) of low genetic diversity. The term “low genetic diversity” is defined as having from one to ten distinguishable haplotypes across all germplasm in the intended heterotic group, the intended maturity group, or the intended heterotic and maturity group. In some embodiments, the small genomic region comprises 1, 2, 3, 4, 5, 6, 7, 8, 9 or 10 distinguishable haplotypes across all germplasm in the intended heterotic group, the intended maturity group, or the intended heterotic and maturity group.

[0037] As used herein, the term “heterotic group” refers to a collection of germplasm which, when crossed to germplasm external to its group (usually another heterotic group), tends to exhibit a higher degree of heterosis (on average) then when crossed to a member of its own group. Two reciprocal heterotic groups define a heterotic pattern. Identification of potential heterotic patterns may be conducted using a population diallele evaluation. The concept of heterotic groups was first developed by maize researchers who observed that inbred lines selected out of certain populations tended to produce superior performing hybrids when hybridized with inbreds from other groups. A heterotic group may also refer to a group of related or unrelated genotypes from the same or different populations, which display similar combining ability when crossed with genotypes from other germplasm groups. Knowledge of the heterotic groups and patterns is helpful in plant breeding. It helps the breeders to utilize their germplasm in a more efficient and consistent manner through exploitation of complementary lines for maximizing the outcome of a hybrid breeding program.

[0038] As used herein, the term “maturity group” refers to a classification of some crop varieties based on their growth and development. For example, a soybean with maturity group O or OO only needs a short growing season before harvest; whereas, a soybean with maturity group V and VI needs a longer growing season before the plant is completely developed and ready for harvest. Maturity groups are also described in the context of their indeterminate/determinate growth habit. In corn, relative maturity (RM) group ratings are related to the duration of the growing season, which is related to the growing degree units (GDUs) required by the plant for flowering and reaching physiological maturity. In corn RM groups are listed as early-RM, mid-RM, and late-RM.

[0039] As used herein, the term “gene expression cassette” refers to a polynucleotide sequence comprising at least a first polynucleotide sequence capable of initiating transcription of an operably linked second polynucleotide sequence and optionally a transcription termination sequence operably linked to the second polynucleotide sequence. In some aspects, the gene expression cassette may comprise a flanking left homology arm, a right homology arm, or both a left homology arm and a right homology arm.

[0040] In some aspects, a sequence of interest provided herein comprises 0, at least 1,at least 2, at least 3, at least 4, at least 5, at least 6, at least 7, at least 8, at least 9, or at least 10 expression cassettes. In some aspects, the sequence of interest provided herein comprises one or more expression cassettes physically and/or operably linked in a cassette stack. In some aspects a sequence of interest comprises an expression cassette adjacent to a left homology arm DNA sequence, a right homology arm DNA sequence, or a left homology arm DNA sequence and a right homology arm DNA sequence. In some aspects, a sequence of interest comprises an expression cassette flanked by homology arm DNA sequences. In some aspects, a sequence of interest comprises an expression cassette that is not flanked by homology arms. In another aspect, a sequence of interest provided herein comprises an endogenous polynucleotide sequence. In some embodiments, the endogenous polynucleotide sequence comprises an intergenic sequence, a native gene, or a mutated gene. In another aspect, a sequence of interest provided herein comprises an exogenous polynucleotide sequence.

[0041] In an aspect, a sequence of interest provided herein comprises 0, at least 1, or at least 2 homology arm DNA sequences. When a sequence of interest provided herein comprises at least two homology arm DNA sequences the at least two homology arm DNA sequences can be distinguished by referring to them as a “left homology arm DNA sequence” and a “right homology arm DNA sequence.” In an aspect, a sequence of interest provided herein comprises both a left homology arm DNA sequence and a right homology arm DNA sequence. In an aspect, a right homology arm DNA sequence and a left homology arm DNA sequence provided herein are homologous to a targeted genomic DNA sequence in the plant or plant cell. In an aspect, a right homology arm DNA sequence and a left homology arm DNA sequence are not essentially homologous to each other. In another aspect, a right homology arm DNA sequence and a left homology arm DNA sequence are essentially homologous to each other. In an aspect, a sequence of interest comprises one or more expression cassettes positioned between a right homology arm DNA sequence and a left homology arm DNA sequence. In an aspect, a sequence of interest comprises a sequence for templated genome editing positioned between a right homology arm DNA sequence and a left homology arm DNA sequence. In yet another aspect, at least part of a sequence of interest provided herein is outside of the region comprising a left homology arm DNA sequence, a right homology arm DNA sequence, and one or more cassettes. In another aspect, at least part of a sequence of interest provided herein is within the region comprising a left homology arm DNA sequence, a right homology arm DNA sequence, and a sequence for templated genome editing.

[0042] As used herein, the term “homology arm” or “homology arm DNA sequence” refers to a polynucleotide sequence that has at least 80%, at least 85%, at least 90%, at least 91%, at least 92%, at least 93%, at least 94%, at least 95%, at least 96%, at least 97%, at least 98%, at least 99% or 100% sequence identity to a target sequence in a plant or plant cell. A homology arm can comprise at least 5, at least 10, at least 15, at least 20, at least 25, at least 30, at least 35, at least 40, at least 45, at least 50, at least 55, at least 60, at least 65, at least 70, at least 75, at least 80, at least 85, at least 90, at least 95, at least 100, at least 150, at least 200, at least 250, at least 300, at least 400, at least 500, at least 600, at least 700, at least 800, at least 900, at least 1000, or at least 2500 nucleotides.

[0043] In one aspect, the target sequence comprises a protein-coding sequence. In one aspect, the target sequence is a genic sequence. As used herein, a “genic” sequence is a nucleic acid sequence that encodes a protein or a non-protein-coding RNA. A genic sequence can include one or more introns. In another aspect, the target sequence is a non-genic sequence. As used herein, a “non-genic” sequence is a nucleic acid sequence that is not a genic sequence. In another aspect, the target sequence comprises a non-coding sequence. In yet another aspect, the target sequence comprises both a protein-coding sequence and a non-coding sequence. In another aspect, the target sequence does not comprise a gene or a portion of a gene. In some embodiments, the target sequence is linked to a gene of interest. In some embodiments, the target sequence is linked to a transgene integrated in the genome of a plant or plant cell.

[0044] In one embodiment, the optimal target site is positioned 2 kb from either the 5′ or the 3′ end of a gene, and the 2 kb genomic region between the target site and the end of the gene is as a region for homologous recombination. As such, the 2 kb sequence is used to engineer homology arms flanking the DNA of interest to be integrated at the target site.

[0045] In one embodiment, a target site is selected that is in a region that is greater than 200 nucleotides of a sRNA hotspot.

[0046] In one embodiment, a target site is selected that is in a region≤200 nucleotides of a sRNA hotspot. In some embodiments, a target site is selected for integration of a transgene cassette by homologous recombination, wherein the homology arms flanking the transgene cassette are designed such that the transgene cassette integrates at the target site in a ‘head-to-head’ orientation with the sRNA hotspot. This ‘head-to-head’ orientation is where the direction of transcription of the transgene cassette is in the opposite orientation of the direction of transcription of the sRNA hotspot within the genome. This head-to-head orientation will reduce the chance of incorporation of sRNA binding sites during transcription of mRNA from the transgene cassette.

[0047] In another embodiment, a target site is selected that is in a region (≤200 nucleotides) of a sRNA hotspot. If the target site is selected for integration of a transgene cassette by homologous recombination, then the homology arms flanking the transgene cassette are designed to have homology to a genomic within the sRNA hotspot, or flanking on the distal 5′-end (for a 5′ homology arm) or the distal 3′-end (for a 3′ homology arm) of the sRNA hotspot. Thereby, and during the HR-dependent integration of the transgene cassette the process of homologous recombination effectively truncates and/or deletes the sRNA hotspot from the final transgenic genomic locus.

[0048] As used herein, the term “endogenous sequence” refers to the native form of a polynucleotide, gene, or polypeptide in its natural location in the organism or in the genome of an organism.

[0049] As used herein, the term “exogenous sequence” refers to any nucleic acid sequence that has been removed from its native location and inserted into a new location altering the sequences that flank the nucleic acid sequence that has been moved. For example, an exogenous DNA sequence may comprise a sequence from another species, a process referred to as transgenesis. Alternatively, an exogenous DNA sequence may comprise a sequence from the same, or related species, a process referred to as cisgenesis.

[0050] As used herein, the term “site-specific genome modification enzyme” refers to any enzyme that can cleave a nucleotide sequence in a site-specific manner. In the present disclosure, site-specific genome modification enzymes include endonucleases, recombinases, transposases, helicases, and any combination thereof. In some embodiments, the site-specific genome modification enzyme is selected from a meganuclease, a zinc finger nuclease, a transcription activator-like effector nuclease (TALEN), a Cas9 nuclease, a Cpf1 nuclease, a Cas 12a nuclease, a Cas12e nuclease, a CasX nuclease, a Cas 12d nuclease, a CasY nuclease, a Cas12b nuclease, a C2C1 nuclease, a Cas 12c nuclease, a C2C3 nuclease, a C2C4 nuclease, a C2C5 nuclease, a C2C6 nuclease, a C2C7 nuclease, a C2C8 nuclease, a C2C9 nuclease, a C2C10 nuclease, a Cas13a nuclease, a Cas13b nuclease, and a Cas 13c nuclease.

[0051] As used herein, the terms “homology” and “identity” when used in relation to nucleic acids, describe the degree of similarity between two or more nucleotide sequences. The percentage of “sequence identity” between two sequences is determined by comparing two optimally aligned sequences over a comparison window, such that the portion of the sequence in the comparison window may comprise additions or deletions (gaps) as compared to the reference sequence (which does not comprise additions or deletions) for optimal alignment of the two sequences. The percentage is calculated by determining the number of positions at which the identical nucleic acid base or amino acid residue occurs in both sequences to yield the number of matched positions, dividing the number of matched positions by the total number of positions in the window of comparison, and multiplying the result by 100 to yield the percentage of sequence identity. A sequence that is identical at every position in comparison to a reference sequence is said to be identical to the reference sequence and vice-versa. An alignment of two or more sequences may be performed using any suitable computer program. For example, a widely used and accepted computer program for performing sequence alignments is CLUSTALW v1.6 (Thompson, et al. (1994) Nucl. Acids Res., 22:4673-4680). Methods and Compositions for Site-directed Integration in Plants

[0052] The present disclosure provides a recombinant sequence comprising a non-genic plant genomic sequence and a DNA of interest, wherein the DNA of interest is inserted into a target site in the non-genic plant genomic sequence, and wherein the target site is located in a haplotype window associated with a neutral to positive impact on one or more agronomic traits, and wherein the target site is further located at genetic distance greater than 1 cM of a haplotype window that is associated with a negative impact on one or more agronomic traits.

[0053] The present disclosure also provides a method of making a transgenic plant cell comprising a donor sequence targeted to at least one non-genic plant genomic sequence, the method comprising: (a) selecting a target site located within a haplotype window associated with a neutral to positive impact on one or more agronomic traits; (b) introducing a site-specific genome modification enzyme into a plant cell, wherein the site-specific genome modification enzyme cleaves the target site in the non-genic plant genomic sequence; (c) introducing a donor sequence; (d) targeting the donor sequence to the target site, wherein the cleavage of the target site facilitates integration of the donor sequence into the non-genic plant genomic sequence; and (e) selecting transgenic cells comprising the donor sequence integrated into the non-genic plant genomic sequence.

[0054] As used herein, an agronomic trait is a measure of crop performance. Non-limiting examples of agronomic traits, from seeding to harvest, include: yield, car relative maturity, car height, car number, increased car size, grain moisture, increased car dry weight per plant, increased number of kernels per ear, increased weight per kernel, increased number of kernels per plant, decreased car void, extended grain fill period, test weight, pod number, number of seed per pod, pod position on the plant, number of internodes, incidence of pod shatter, grain size, decreased days from planting to maturity, increased stalk size, increased number of leaves, increased plant height growth rate in vegetative stage, plant architecture, resistance to lodging, percent seed germination, seedling vigor, juvenile traits, efficiency of germination (including germination in stressed conditions), growth rate (including growth rate in stressed conditions), increased number of root branches, increased total root length, efficiency of nodulation and nitrogen fixation, enhanced nitrogen use efficiency, increased water use efficiency as compared to a control plant, efficiency of nutrient assimilation, resistance to biotic and abiotic stress, carbon assimilation, physiology, enhanced disease or pest resistance, or environmental or chemical tolerance, enhanced cold tolerance, nutritional enhancement, enhanced seed protein, enhanced seed starch, enhanced seed oil, plant height, enhanced plant morphology, growth and development, and stay green rating.

[0055] In some embodiments, the non-genic plant sequence is a soybean genomic sequence or a corn genomic sequence. In some embodiments, the corn genomic sequence is selected from the group consisting of SEQ ID NOs:123-172, 294, 299-551, 555, and 556. In other embodiments, the soybean genomic sequence is selected from the group consisting of SEQ ID NOs:251-282, 554.

[0056] In some embodiments, the target site is located within a small genomic region (e.g., less than 500 bp, less than 1000 bp, less than 2000 bp) of low genetic diversity, where low genetic diversity is defined as having between one, two, three, four, five, six, seven, eight, nine and ten distinguishable haplotypes across all germplasm in an intended heterotic group, an intended maturity group, or an intended heterotic and maturity group.

[0057] In some embodiments, the target site comprises at least 75, at least 80, at least 80, at least 100, at least 200, at least 300, at least 400, at least 500, at least 600, at least 700, at least 800, at least 900, or at least 1000 nucleotides. In some embodiments, the target site comprises about 100, about 150, about 200, about 250, about 300, about 350, about 400, about 450, about 500, about 550, about 600, about 650, about 700, about 750, about 800, about 850,about 900, about 950, about 1000, about 1100, about 1200, about 1300, about 1400, about 1500, about 1600, about 1700, about 1800, about 1900, or about 2000 nucleotides.

[0058] In one aspect, the haploid window is defined by genetic distance. In some embodiments, the genetic distance is from about 0.1 cM to about 5 cM. In some embodiments, the genetic distance is about 0.1 cM, about 0.2 cM, about 0.3 cM, about 0.4 cM, about 0.5 cM, about 0.6 cM, about 0.7 cM, about 0.8 cM, about 0.9 cM, about 1 cM, about 1.5 CM, about 2cM, about 2.5 CM, about 3 cM, about 3.5 CM, about 4 cM, about 4.5 cM, or about 5 cM.

[0059] In some embodiments, the haplotype window is based on physical distance of the haplotype window which is from about 40 base pairs to the full length of the chromosome, with at least 99% sequence similarity across germplasm and contains two or fewer indels of ˜3 kb.

[0060] In some embodiments, the target site is further located at a genetic distance of greater than 1 cM, greater than 2 cM, greater than 3 cM, greater than 4 cM, greater than 5 cM, greater than 6 cM, greater than 7 cM, greater than 8 cM, greater than 9 cM, or greater than 10 cM of a haplotype window that is associated with a negative impact on one or more agronomic traits.

[0061] In some embodiments, the target site comprises one or more of the criteria selected from the group consisting of: the target site is located greater than 2 kb from a 5′ or a 3′ end of a gene in the plant genome; the target site is located more than 1 kb from a 5′ or a 3′ end of a repeat region in the plant genome, and wherein the repeat region is at least 2 kb in length; the target site is located more than 1 kb from a 5′ or a 3′ end of a repressive chromatin mark in the plant genome; the target site is located more than 200 bases from a small RNA (sRNA) hotspot in the plant genome, and wherein the sRNA hotspot is a sequence from 0.2 to 1 kb in length; the target site is within a region of the plant genome of low a DNA methlyation; the target site is not within a region of the plant genome associated with at least one methylation read containing an MspJi motif or a LpnPI motif; and the target site is within a region of the plant genome that exhibits a total k-mer redundancy score of less than or equal to 30%. In some embodiments, the total k-mer redundancy score is less than or equal to 30%, 29%, 28%, 27%, 26%, 25%, 24%, 23%, 22%, 21%, 20%, 19%, 18%, 17%, 16%, 15%, 14%, 13%, 12%, 11%, or 10%. In some embodiments, the target site is within a 100 bp, 150 bp, 200 bp, 250 bp, 300 bp, 350 bp, 400 bp, 500 bp, 550 bp, 600 bp, 650 bp, 700 bp, 750 bp, 800 bp, 850 bp, 900 bp, 950 bp, or 1,000 bp region of the plant genome that exhibits redundancy score of less than or equal30%, 29%, 28%, 27%, 26%, 25%, 24%, 23%, 22%, 21%, 20%, 19%, 18%, 17%, 16%, 15%, 14%, 13%, 12%, 11%, or 10%.

[0062] As used herein, the term “repeat region” refers to a region that is identified by alignment of the host sequence to an annotated second sequence comprising repeat regions wherein the annotation is compiled with genomic repeat identification software.

[0063] As used herein, the term “repressive chromatin mark” refers to a statistically significant H3K27me3 (p-value≤5e−3) peak using ChIP-seq peak calling software.

[0064] As used herein, the term “small RNA (sRNA) hotspot” refers to a sequence location from 0.2 to 1 Kb in length with statistically significant sRNA abundance (p-value≤5e−3) relative to population average. To identify sRNA hotspots, germplasm-specific sRNA transcripts 21, 22, and 24 nucleotides long, with calculated abundances at least 1 RPM (read per million), are mapped to the genomic sequence to identify regions of high sRNA abundance (Heisel et al., (2008) PLOS ONE 3(8):1-10).

[0065] As used herein, the term “DNA methylated region” refers to a locus with a total number of overlapping, but not identical, methylation reads that represent at least 6% of methylation reads identified in the population average of the methylated region.

[0066] As used herein, the term “MspJi motif” refers to the consensus genomic sequence CNNR[N]16 (SEQ ID NO:552: cnnrnnnnnn nnnnnnnnnn; where for (2) . . . (3), n is a, c, g, or t; and for (5) . . . (20), n is a, c, g, or t). The term “LpnPI motif” refers to the consensus genomic sequence CSD [N] 16 (SEQ ID NO:553: csdnnnnnnn nnnnnnnnn; where for (4) . . . (19), n is a, c, g, or t). MspJI is a modification-dependent restriction endonuclease that cleaves at a fixed distance away from the modification site. MspJI homologs include, but are not limited to, FspEI, LpnPI, AspBHI, RlaI, and SgrTI. All the enzymes specifically recognize cytosine C5 modification (methylation or hydroxymethylation) in DNA and cleave at a constant distance (N12/N16) away from the modified cytosine. Each MspJI homolog displays its own sequence context preference, favoring different nucleotides flanking the modified cytosine.

[0067] As used herein, the term “k-mer redundancy score” is used to calculate a genome redundancy score that quantifies the likelihood of an unique site for site-specific genome modification enzyme cutting, with little off-target effect. The total redundancy score for a selected genomic region is calculated as the percentage of redundant k-mers present in the region. As used herein, “total redundancy score” is calculated as the number of redundant k-mers (having a redundancy score>1) in the region, divided by the total number of k-mers in that region (1000-k for a 1 Kb region), multiplied by 100. In one aspect of the present disclosure, genomic regions with a total redundancy score of 30 or lower (at least 70% of the k-mers in the intergenic region are unique) is accepted for consideration. In some embodiments, genomic regions with a total redundancy score of 35, 30, 25, 20, 15, 10, 5 or lower is accepted for consideration.

[0068] In some embodiments, the agronomic trait is selected from one or more of the group consisting of: yield, car relative maturity, car height, car number, increased car size, grain moisture, increased car dry weight per plant, increased number of kernels per ear, increased weight per kernel, increased number of kernels per plant, decreased car void, extended grain fill period, test weight, pod number, number of seed per pod, pod position on the plant, number of internodes, incidence of pod shatter, grain size, decreased days from planting to maturity, increased stalk size, increased number of leaves, increased plant height growth rate in vegetative stage, plant architecture, resistance to lodging, percent seed germination, seedling vigor, juvenile traits, efficiency of germination (including germination in stressed conditions), growth rate (including growth rate in stressed conditions), increased number of root branches, increased total root length, efficiency of nodulation and nitrogen fixation, enhanced nitrogen use efficiency, increased water use efficiency as compared to a control plant, efficiency of nutrient assimilation, resistance to biotic stress, resistance to abiotic stress, carbon assimilation, physiology, enhanced disease or pest resistance, or environmental or chemical tolerance, enhanced cold tolerance, nutritional enhancement, enhanced seed protein, enhanced seed starch, enhanced seed oil, plant height, enhanced plant morphology, growth and development, and stay green rating.

[0069] In some embodiments, the donor sequence comprises a gene expression cassette comprising a sequence selected from an insecticidal resistance gene, a herbicide tolerance gene, a nitrogen use efficiency gene, a water use efficiency gene, a nutritional quality gene, a DNA binding gene, a selectable marker gene, and any combination thereof.

[0070] In some embodiments, the donor sequence is an exogenous sequence. In some embodiments, the donor sequence comprises an expression cassette.

[0071] In some embodiments, the donor sequence comprises a nucleotide sequence that contains at least one functional element, where the functional element is capable of assisting in the insertion, the expression, or the identification of the donor sequence. In some embodiments, the functional element is a promoter, a selectable marker gene, or a targeting sequence.

[0072] In some embodiments, the DNA of interest is integrated into the target site via a homologous recombination. In other embodiments, the DNA of interest is integrated into the target site via a non-homologous end joining.

[0073] In some embodiments, DNA of interest is integrated into the target site via a site-specific genome modification enzyme. In some embodiments, the site-specific genome modification enzyme is selected from an endonuclease, a recombinase, a transposase, and any combination thereof. In some embodiments, the endonuclease is selected from a meganuclease, a zinc finger nuclease, a transcription activator-like effector nuclease (TALEN), a Cas9 nuclease, a Cpf1 nuclease, a Cas12a nuclease, a Cas12e nuclease, a CasX nuclease, a Cas12d nuclease, a CasY nuclease, a Cas12b nuclease, a C2C1 nuclease, a Cas12c nuclease, a C2C3 nuclease, a C2C4 nuclease, a C2C5 nuclease, a C2C6 nuclease, a C2C7 nuclease, a C2C8 nuclease, a C2C9 nuclease, a C2C10 nuclease, a Cas13a nuclease, a Cas13b nuclease, and a Cas13c nuclease. In some embodiments, the recombinase is a tyrosine recombinase attached to a DNA recognition motif, or a serine recombinase attached to a DNA recognition motif. In some embodiments, the tyrosine recombinase attached to a DNA recognition motif is selected from the group consisting of a Cre recombinase, a Flp recombinase, and a Tnp1 recombinase. In some embodiments, the serine recombinase attached to a DNA recognition motif is selected from the group consisting of a PhiC31 integrase, an R4 integrase, and a TP-901 integrase. In some embodiments, the transposase is a DNA transposase attached to a DNA binding domain.

[0074] In some embodiments, a TALEN target site comprises a 5′-TALEN binding site, a spacer sequence, and a 3′TALEN binding site. In some embodiments, the TALEN binding sites within the TALEN target site of corn genomic regions is selected from the SEQ ID NOs presented in Table 1. In some embodiments, the TALEN binding sites within the TALEN target site of soybean genomic region is selected from the SEQ ID NOs presented in Table 2.

[0075] The present disclosure also provides a plant, plant cell, or plant part comprising a recombinant sequence as disclosed herein.

[0076] In certain embodiments, the plant is selected from: alfalfa, aneth, apple, apricot, artichoke, arugula, asparagus, avocado, banana, barley, beans, beet, blackberry, blueberry, broccoli, brussel sprouts, cabbage, canola, cantaloupe, carrot, cassava, cauliflower, celery, cherry, cilantro, citrus, clementine, coffee, corn, cotton, cucumber, Douglas fir, eggplant, endive, escarole, eucalyptus, fennel, figs, gourd, grape, grapefruit, honey dew, jicama, kiwifruit, lettuce, leeks, lemon, lime, Loblolly pine, mango, melon, mushroom, nut, oat, okra, onion, orange, an ornamental plant, papaya, parsley, pea, peach, peanut, pear, pepper, persimmon, pine, pineapple, plantain, plum, pomegranate, poplar, potato, pumpkin, quince, radiata pine, radicchio, radish, raspberry, rice, rye, sorghum, Southern pine, soybean, spinach, squash, strawberry, sugarbeet, sugarcane, sunflower, sweet potato, sweetgum, tangerine, tea, tobacco, tomato, turf, a vine, watermelon, wheat, yams, and zucchini plants.

[0077] Methods of transforming plants and plant cells are well known by persons of ordinary skill in the art. For instance, specific instructions for transforming plant cells by microprojectile bombardment with particles coated with recombinant DNA are found in U.S. Pat. No. 5,015,580 (soybean); U.S. Pat. No. 5,550,318 (corn); U.S. Pat. No. 5,538,880 (corn); U.S. Pat. No. 5,914,451 (soybean); U.S. Pat. No. 6,160,208 (corn); U.S. Pat. No. 6,399,861 (corn); U.S. Pat. No. 6,153,812 (wheat); U.S. Pat. No. 6,002,070 (rice); U.S. Pat. No. 7,122,722 (cotton); U.S. Pat. No. 6,051,756 (Brassica); U.S. Pat. No. 6,297,056 (Brassica); US Patent Publication 20040123342 (sugarcane) and Agrobacterium-mediated transformation is described in U.S. Pat. No. 5,159,135 (cotton); U.S. Pat. No. 5,824,877 (soybean); U.S. Pat. No. 5,591,616 (corn); U.S. Pat. No. 6,384,301 (soybean); U.S. Pat. No. 5,750,871 (Brassica); U.S. Pat. No. 5,463,174(Brassica); and U.S. Pat. No. 5,188,958 (Brassica), all of which are incorporated herein by reference. Methods for transforming other plants can be found in, for example, Compendium of Transgenic Crop Plants (2009) Blackwell Publishing. Any appropriate method known to those skilled in the art can be used to transform a plant cell with any of the nucleic acid molecules provided herein.

[0078] In one aspect, a plant cell provided herein is stably transformed. As used herein, “stably transformed” refers to a transfer of DNA into a genome of a targeted cell that allows the targeted cell to pass the transferred DNA to the next generation. In another aspect, a plant cell provided herein is transiently transformed. As used herein, “transiently transformed” is defined as a transfer of DNA into a cell that is not integrated into a genome of the transformed cell.

[0079] In an aspect, a plant cell provided herein is selected from the group consisting of an Acacia cell, an alfalfa cell, an aneth cell, an apple cell, an apricot cell, an artichoke cell, an arugula cell, an asparagus cell, an avocado cell, a banana cell, a barley cell, a bean cell, a beet cell, a blackberry cell, a blueberry cell, a broccoli cell, a Brussels sprout cell, a cabbage cell, a canola cell, a cantaloupe cell, a carrot cell, a cassava cell, a cauliflower cell, a celery cell, a Chinese cabbage cell, a cherry cell, a cilantro cell, a citrus cell, a clementine cell, a coffee cell, a corn cell, a cotton cell, a cucumber cell, a Douglas fir cell, an eggplant cell, an endive cell, an escarole cell, an eucalyptus cell, a fennel cell, a fig cell, a forest tree cell, a gourd cell, a grape cell, a grapefruit cell, a honey dew cell, a jicama cell, kiwifruit cell, a lettuce cell, a leek cell, a lemon cell, a lime cell, a Loblolly pine cell, a mango cell, a maple tree cell, a melon cell, a mushroom cell, a nectarine cell, a nut cell, an oat cell, an okra cell, an onion cell, an orange cell, an ornamental plant cell, a papaya cell, a parsley cell, a pea cell, a peach cell, a peanut cell, a pear cell, a pepper cell, a persimmon cell, a pine cell, a pineapple cell, a plantain cell, a plum cell, a pomegranate cell, a poplar cell, a potato cell, a pumpkin cell, a quince cell, a radiata pine cell, a radicchio cell, a radish cell, a rapeseed cell, a raspberry cell, a rice cell, a rye cell, a sorghum cell, a Southern pine cell, a soybean cell, a spinach cell, a squash cell, a strawberry cell, a sugar beet cell, a sugarcane cell, a sunflower cell, a sweet corn cell, a sweet potato cell, a sweetgum cell, a tangerine cell, a tea cell, a tobacco cell, a tomato cell, a turf cell, a vine cell, watermelon cell, a wheat cell, a yam cell, and a zucchini cell. In another aspect, a plant cell provided herein is selected from the group consisting of a corn cell, a soybean cell, a canola cell, a cotton cell, a wheat cell, and a sugarcane cell.

[0080] In another aspect, a plant cell provided herein is selected from the group consisting of a corn immature embryo cell, a corn mature embryo cell, a corn seed cell, a soybean immature embryo cell, a soybean mature embryo cell, a soybean seed cell, a canola immature embryo cell, a canola mature embryo cell, a canola seed cell, a cotton immature embryo cell, a cotton mature embryo cell, a cotton seed cell, a wheat immature embryo cell, a wheat mature embryo cell, a wheat seed cell, a sugarcane immature embryo cell, a sugarcane mature embryo cell, a sugarcane seed cell.

[0081] In one aspect, plant cells disclosed herein include, but are not limited to, a seed cell, a fruit cell, a leaf cell, a cotyledon cell, a hypocotyl cell, a meristem cell, an embryo cell, an endosperm cell, a root cell, a shoot cell, a stem cell, a pod cell, a flower cell, an inflorescence cell, a stalk cell, a pedicel cell, a style cell, a stigma cell, a receptacle cell, a petal cell, a sepal cell, a pollen cell, an anther cell, a filament cell, an ovary cell, an ovule cell, a pericarp cell, a phloem cell, a bud cell, or a vascular tissue cell. In another aspect, this disclosure provides a plant chloroplast. In a further aspect, this disclosure provides an epidermal cell, a stomata cell, a trichome cell, a root hair cell, a storage root cell, or a tuber cell. In another aspect, this disclosure provides a protoplast. In another aspect, this disclosure provides a plant callus cell.

[0082] In one aspect, the instant disclosure provides a plant, plant cell, or plant part that is transformed by any method provided herein.

[0083] To confirm the presence of integrated DNA in a transformed cell or genome a variety of assays can be performed. Such assays include, for example, molecular biological assays (e.g., Southern and northern blotting, PCR); biochemical assays, such as detecting the presence of a protein product (e.g., by immunological means (ELISAs and western blots), or by enzymatic function (e.g., GUS assay); pollen histochemistry; plant part assays, (e.g., leaf or root assays); and, by analyzing the phenotype of the whole regenerated plant.

### Site-Specific Genome Modification Enzymes

[0084] As used herein, the term “double-strand break inducing agent” refers to any agent that can induce a double-strand break (DSB) on a DNA molecule. In some embodiments, the double-strand break inducing agent is a site-specific genome modification enzyme.

[0085] As used herein, the term “site-specific genome modification enzyme” refers to any enzyme that can modify a nucleotide sequence in a site-specific manner. In the present disclosure, site-specific genome modification enzymes include endonucleases, recombinases, transposases, helicases and any combination thereof.

[0086] Several embodiments relate to promoting recombination by providing a site-specific genome modification enzyme. As used herein, the term “site-specific enzyme” refers to any enzyme that can modify a nucleotide sequence in a site-specific manner. In some embodiments, recombination is promoted by providing a single-strand break inducing agent. In some embodiments, recombination is promoted by providing a double-strand break inducing agent. In some embodiments, recombination is promoted by providing a strand separation inducing reagent. In one aspect, the site-specific genome modification enzyme is selected from an endonuclease, a recombinase, a transposase, a helicase or any combination thereof.

[0087] In one aspect, the endonuclease is selected from a meganuclease, a zinc-finger nuclease (ZFN), a transcription activator-like effector nucleases (TALEN), an Argonaute (non-limiting examples of Argonaute proteins include Thermus thermophilus Argonaute (TtAgo), Pyrococcus furiosus Argonaute (PfAgo), Natronobacterium gregoryi Argonaute (NgAgo), an RNA-guided nuclease, such as a CRISPR associated nuclease (non-limiting examples of CRISPR associated nucleases include Cas1, Cas1B, Cas2, Cas3, Cas4, Cas5, Cas6, Cas7, Cas8, Cas9 (also known as Csnl and Csx12), Cas10, Cal2a, Cas12b, Cas12e, Cas12d, Cas13a, Cas13, Cas13c, Csyl, Csy2, Csy3, Csel, Cse2, Csc1, Csc2, Csa5, Csn2, Csm2, Csm3, Csm4, Csm5, Csm6, Cmr1, Cmr3, Cmr4, Cmr5, Cmr6, Csb1, Csb2, Csb3, Csx17, Csx14, Csx10, Csx16, CsaX, Csx3, Csx1, Csx15, Csf1, Csf2, Csf3, Csf4, Cpf1, C2C1, C2C3, C2C4, C2C5,

[0088] C2C6, C2C7, C2C8, c2C9, C2C10, CasX, CasY homologs thereof, or modified versions thereof).

[0089] In another aspect, the endonuclease is a dCas9-recombinase fusion protein. As used herein, a “dCas9” refers to a Cas9 endonuclease protein with one or more amino acid mutations that result in a Cas9 protein without endonuclease activity, but retaining RNA-guided site-specific DNA binding. As used herein, a “dCas9-recombinase fusion protein” is a dCas9 with a protein fused to the dCas9 in such a manner that the recombinase is catalytically active on the DNA.

[0090] Non-limiting examples of recombinase include a tyrosine recombinase attached to a DNA recognition motif provided herein is selected from the group consisting of a Cre recombinase, a Gin recombinase a Flp recombinase, and a Tnpl recombinase. In an aspect, a Cre recombinase or a Gin recombinase provided herein is tethered to a zinc-finger DNA-binding domain, or a TALE DNA-binding domain, or a Cas9 nuclease. In another aspect, a serine recombinase attached to a DNA recognition motif provided herein is selected from the group consisting of a PhiC31 integrase, an R4 integrase, and a TP-901 integrase. In another aspect, a DNA transposase attached to a DNA binding domain provided herein is selected from the group consisting of a TALE-piggyBac and TALE-Mutator.

[0091] Site-specific genome modification enzymes, such as meganucleases, ZFNs, TALENs, Argonaute proteins (non-limiting examples of Argonaute proteins include Thermus thermophilus Argonaute (TtAgo), Pyrococcus furiosus Argonaute (PfAgo), Natronobacterium gregoryi Argonaute (NgAgo), homologs thereof, or modified versions thereof), RNA-guided nucleases (non-limiting examples of RNA-guided nucleases include the CRISPR associated nucleases, such as Cas1, Cas1B, Cas2, Cas3, Cas4, Cas5, Cas6, Cas7, Cas8, Cas9 (also known as Csnl and Csx12), Cas10, Cal2a, Cas12b, Cas12c, Cas12d, Cas13a, Cas13, Cas13c, Csy1, Csy2, Csy3, Csel, Cse2, Csc1, Csc2, Csa5, Csn2, Csm2, Csm3, Csm4, Csm5, Csm6, Cmr1, Cmr3, Cmr4, Cmr5, Cmr6, Csb1, Csb2, Csb3, Csx17, Csx14, Csx10, Csx16, CsaX, Csx3, Csx1, Csx15, Csf1, Csf2, Csf3, Csf4, Cpf1, C2C1, C2C3, C2C4, C2C5, C2C6, C2C7, C2C8, c2C9, C2C10, CasX, CasY, homologs thereof, or modified versions thereof) and engineered RNA-guided nucleases (RGNs), induce a genome modification such as a double-stranded DNA break (DSB) or single-strand DNA break at the target site of a genomic sequence that is then repaired by the natural processes of homologous recombination (HR) or non-homologous end-joining (NHEJ). Sequence modifications then occur at the cleaved sites, which can include deletions or insertions that result in gene disruption in the case of NHEJ, or integration of exogenous sequences by homologous recombination.

[0092] In one aspect of the present disclosure, site-specific genome modification enzymes are selected to induce a genome modification in one, a few, or many individual target sequences of the plant genomic sequences provided herein. After exposure to the site-specific genome modification enzyme, the resulting recombinant nucleic acid can be identified in various ways including sequencing, PCR amplification, Southern analysis, or other molecular methods used to detect recombinant nucleic acid sequence. Site-specific genome modification enzymes may be expressed in plants such that one or more genome modifications occur within a genomic locus, and resulting progeny screened for molecular changes.

[0093] Any of the DNA of interest provided herein can be integrated into a target site of a plant genomic sequence by introducing the DNA of interest and the provided site-specific genome modification enzymes. Any method provided herein can utilize any site-specific genome modification enzyme provided herein.

### ZFNs

[0094] Zinc finger nucleases (ZFNs) are synthetic proteins characterized by an engineered zinc finger DNA-binding domain fused to the cleavage domain of the FokI restriction endonuclease. ZFNs can be designed to cleave almost any long stretch of double-stranded DNA for modification of the zinc finger DNA-binding domain. ZFNs form dimers from monomers composed of a non-specific DNA cleavage domain of FokI endonuclease fused to a zinc finger array engineered to bind a target DNA sequence.

[0095] The DNA-binding domain of a ZFN is typically composed of 3-4 zinc-finger arrays. The amino acids at positions −1, +2, +3, and +6 relative to the start of the zinc finger ∞-helix, which contribute to site-specific binding to the target DNA, can be changed and customized to fit specific target sequences. The other amino acids form the consensus backbone to generate ZFNs with different sequence specificities. Rules for selecting target sequences for ZFNs are known in the art.

[0096] The FokI nuclease domain requires dimerization to cleave DNA and therefore two ZFNs with their C-terminal regions are needed to bind opposite DNA strands of the cleavage site (separated by 5-7 bp). The ZFN monomer can cute the target site if the two-ZF-binding sites are palindromic. The term ZFN, as used herein, is broad and includes a monomeric

[0097] ZFN that can cleave double stranded DNA without assistance from another ZFN. The term ZFN is also used to refer to one or both members of a pair of ZFNs that are engineered to work together to cleave DNA at the same site.

[0098] Because the DNA-binding specificities of zinc finger domains can in principle be re-engineered using one of various methods, customized ZFNs can theoretically be constructed to target nearly any gene sequence. Publicly available methods for engineering zinc finger domains include Context-dependent Assembly (CoDA), Oligomerized Pool Engineering (OPEN), and Modular Assembly.

### TALENs

[0099] Transcription activator-like effectors (TALEs) can be engineered to bind practically any DNA sequence. TALE proteins are DNA-binding domains derived from various plant bacterial pathogens of the genus Xanthomonas. The X pathogens secrete TALEs into the host plant cell during infection. The TALE moves to the nucleus, where it recognizes and binds to a specific DNA sequence in the promoter region of a specific DNA sequence in the promoter region of a specific gene in the host genome. TALE has a central DNA-binding domain composed of 13-28 repeat monomers of 33-34 amino acids. The amino acids of cach monomer are highly conserved, except for hypervariable amino acid residues at positions 12 and 13. The two variable amino acids are called repeat-variable diresidues (RVDs). The amino acid pairs NI, NG, HD, and NN of RVDs preferentially recognize adenine, thymine, cytosine, and guanine/adenine, respectively, and modulation of RVDs can recognize consecutive DNA bases. This simple relationship between amino acid sequence and DNA recognition has allowed for the engineering of specific DNA binding domains by selecting a combination of repeat segments containing the appropriate RVDs. The transcription activator-like effector (TALE) DNA binding domain can be fused to a functional domain, such as a recombinase, a nuclease, a transposase or a helicase, thus conferring sequence specificity to the functional domain.

[0100] Transcription activator-like effector nucleases (TALENs) are artificial restriction enzymes generated by fusing the transcription activator-like effector (TALE) DNA binding domain to a nuclease domain. The term TALEN, as used herein, is broad and includes a monomeric TALEN that can cleave double stranded DNA without assistance from another TALEN. The term TALEN is also used to refer to one or both members of a pair of TALENs that work together to cleave DNA at the same site. In some embodiments, the nuclease is selected from a group consisting of PvuII, MutH, TevI, FokI, AlwI, MlyI, SbfI, SdaI, StsI, CleDORF, Clo051, and Pept071. When FokI is fused to a TALE domain each member of the TALEN pair binds to the DNA sites flanking a target site, the FokI monomers dimerize and cause a DSB at the target site.

[0101] Besides the wild-type FokI cleavage domain, variants of the FokI cleavage domain with mutations have been designed to improve cleavage specificity and cleavage activity. The FokI domain functions as a dimer, requiring two constructs with unique DNA binding domains for sites in the target genome with proper orientation and spacing. Both the number of amino acid residues between the TALEN DNA binding domain and the FokI cleavage domain, and the number of bases between the two individual TALEN binding sites are parameters for achieving high levels of activity. PvuII, MutH, and TevI cleavage domains are useful alternatives to FokI and FokI variants for use with TALEs. Pvull functions as a highly specific cleavage domain when coupled to a TALE (see Yank et al. 2013. PLOS One. 8: e82539). MutH is capable of introducing strand-specific nicks in DNA (see Gabsalilow et al. 2013. Nucleic Acids Research. 41: c83). TevI introduces double-stranded breaks in DNA at targeted sites (see Beurdeley et al., 2013. Nature Communications. 4:1762).

[0102] The relationship between amino acid sequence and DNA recognition of the TALE binding domain allows for designable proteins. Software programs such as DNA Works can be used to design TALE constructs. Other methods of designing TALE constructs are known to those of skill in the art. Doyle et al. (2012) TAL Effector-Nucleotide Targeter (TALE-NT) 2.0: tools for TAL effector design and target prediction. Nucleic Acids Res. 40(W1):W117-W122; Cermak (2011). Efficient design and assembly of custom TALEN and other TAL effector-based constructs for DNA targeting. Nucleic Acids Res. 39(12):e82.

### Meganucleases

[0103] Meganucleases, which are commonly identified in microbes, are unique enzymes with high activity and long recognition sequences (>14 bp) resulting in site-specific digestion of target DNA. Engineered versions of naturally occurring meganucleases typically have extended DNA recognition sequences (for example, 14-40 bp).

[0104] The engineering of meganucleases is more challenging than that of ZFNs and TALENs because the DNA recognition and cleavage functions of meganucleases are intertwined in a single domain. Specialized methods of mutagenesis and high-throughput screening have been used to create novel meganuclease variants that recognize unique sequences and possess improved nuclease activity.

### Argonaute

[0105] The Argonaute protein family is a DNA-guided endonuclease. The Argonaute isolated from Natronobacterium gregoryi has been reported to be suitable for DNA-guided genome editing in human cells (Gao, et al. DNA-guided genome editing using the Natronobacterium gregoryi Argonaute. Nature Biotechnology 34:768-773 (2016). Argonaute endonucleases from other species have been identified, (non-limiting examples of Argonaute proteins include Thermus thermophilus Argonaute (TtAgo), Pyrococcus furiosus Argonaute (PfAgo), Natronobacterium gregoryi Argonaute (NgAgo), homologs thereof, or modified versions thereof). A sequence encoding a DNA guide is associated with each of these unique Argonaute endonucleases.

### CRISPR

[0106] The CRISPR (clustered regularly interspaced short palindromic repeats)/Cas (CRISPR-associated) system is an alternative to synthetic proteins whose DNA-binding domains enable them to modify genomic DNA at specific sequences (e.g., ZFN and TALEN). Specificity of the CRISPR/Cas system is based on an RNA-guide that use complementary base pairing to recognize target DNA sequences. In some embodiments, the site-specific genome modification enzyme is a CRISPR/Cas system. In an aspect, a site-specific genome modification enzyme provided herein can comprise any RNA-guided Cas nuclease (non-limiting examples of RNA-guided nucleases include Cas1, Cas1B, Cas2, Cas3, Cas4, Cas5, Cas6, Cas7, Cas8, Cas9 (also known as Csnl and Csx12), Cas10, Cal2a, Cas12b, Cas12c, Cas12d, Cas13a, Cas13, Cas13c, Csy1, Csy2, Csy3, Csel, Csc2, Csc1, Csc2, Csa5, Csn2, Csm2, Csm3, Csm4, Csm5, Csm6, Cmr1, Cmr3, Cmr4, Cmr5, Cmr6, Csb1, Csb2, Csb3, Csx 17, Csx 14, Csx 10, Csx 16, CsaX, Csx3, Csx1, Csx 15, Csf1, Csf2, Csf3, Csf4, Cpf1, C2C1, C2C3, C2C4, C2C5, C2C6, C2C7, C2C8, c2C9, C2C10, CasX, CasY, homologs thereof, or modified versions thereof); and, optionally, the tracr and/or guide RNA necessary for targeting the respective nucleases.

[0107] CRISPR/Cas systems are part of the adaptive immune system of bacteria and archaca, protecting them against invading nucleic acids such as viruses by cleaving the foreign DNA in a sequence-dependent manner. The immunity is acquired by the integration of short fragments of the invading DNA known as spacers between two adjacent repeats at the proximal end of a CRISPR locus. The CRISPR arrays, including the spacers, are transcribed during subsequent encounters with invasive DNA and are processed into small interfering CRISPR RNAs (crRNAs) approximately 40 nt in length, which combine with the trans-activating CRISPR RNA (tracrRNA) to activate and guide the Cas9 nuclease. This cleaves homologous double-stranded DNA sequences known as protospacers in the invading DNA. A prerequisite for cleavage is the presence of a conserved protospacer-adjacent motif (PAM) downstream of the target DNA, which usually has the sequence 5′-NGG-3′ but less frequently 5′-NAG-3′. Specificity is provided by the so-called “seed sequence” approximately 12 bases upstream of the PAM, which must match between the RNA and target DNA. Cpf1 acts in a similar manner to Cas9, but Cpf1 does not require a separate tracrRNA.

[0108] The following Examples are presented for the purposes of illustration and should not be construed as limitations.

### EXAMPLES

### Example 1: Target Site Selection

[0109] A flowchart for selecting target sites for site-specific genome modification (including, integration of a DNA of interest into a genomic sequence) is shown in FIG. 1. This flowchart illustrates steps that include bioinformatic analysis of a host genome and the application of specific selection criteria to identify target sites for site-specific genome modification. The analysis includes one or more of the following site-specific selection criteria: 1) selection of an initial haplotype window that has a neutral or positive association with an agronomic trait, 2) the target site is within an intergenic region, 3) the target site is greater than or equal to 1 kb away from a long repeat region, 4) the target site is greater than or equal to 1 kb away from a repressive chromatin mark (e.g., H3K27me3 peak), 5) the target site is within a region with a low redundancy score (less-than or equal to 30%), 6) the target site is within a region with a low DNA methylation score (less-than or equal to 10% of genome wide population average), 7) the target site is greater-than or equal to 200 bp away from a small RNA (sRNA) hotspot, 8) selecting areas targetable by site-specific genome modification enzymes.

[0110] For case of presentation, the target site selection process is presented as the flowchart in FIG. 1. The steps in which the target site selection criteria are completed may be in any order. For example, the step of determining if a target site is within a region with a low redundancy score (less-than or equal to 30%) may be completed prior the step of determining whether the target site is within an intergenic region. In some instances, not all the criteria will be used to select a target site.

[0111] The first step shown in FIG. 1 is the selection of a haplotype window that has a neutral or positive association with an agronomic trait. This haplotype window would be located within a region of low genetic diversity (defined as, ten or fewer haplotypes), and at least 1 cM away from a haplotype window associated with yield drag (or drag of another undesired agronomic trait). The specific target site is selected from a sequence within the low diversity haplotype window. Low genetic diversity is defined as having between one and ten distinguishable haplotypes across all germplasm in the intended heterotic group, the intended maturity group, or the intended heterotic and maturity group, such as disclosed in US Patent Pub. No. 2013/0276173, which is incorporated here in its entirety. Inserting new donor nucleotides near positive haplotype windows within genetic distance of 0.1 cM to 5 cM minimizes the likelihood that trait associations will be disrupted by genetic recombination, and allows trait stacking of favorable genes. Short genetic distance would allow negative traits to be bred out, but only after conducting prolonged and expensive crossing experiments.

[0112] Another step in the target site selection process is to select a specific target site that is within an intergenic region. Selection of an intergenic region is done to avoid disruption of endogenous genes. Genomic regions immediately upstream (5′) or downstream (3′) of genes are avoided as sites for genome modification, as these regions may contain regulatory sequences required for proper gene function. Although genes, and regions located less than 2 Kb from either the 5′ or the 3′ end of these genes are avoided as target sites for genome modification, the sequence is included in further analysis steps because the genomic regions could function as a homology region for targeted integration of a DNA of interest by homologous recombination. Bioinformatic analysis is done using publicly available annotation of particular genomes to identify genic regions. Specific target sites are selected that are greater than or equal to 2 Kb from either the 5′- or 3′-end of known genes and within the selected haplotype window. The intergenic regions remaining after discarding coding regions in the haplotype window form the pool of potential sites for the next phase of target site selection.

[0113] A further step in the target site selection process is to select a region that is not in or adjacent to genomic repeat regions. Highly repetitive DNA is frequently found in heterochromatic genomic regions. Due to the repeat structure, site-specific genome modification may be inefficient and/or result in reduced agronomic benefit. For example, with integration of a transgenic expression cassette, the repeat region may result in reduced transcription of the transgene cassette resulting in reduced expression of the transgene. For the analysis, the sequence of the genomic regions within selected low diversity haplotype windows are evaluated bioinformatically to identify specific nucleotide coordinates of repeat regions, and then further analyzed by visualization in using Genome Browser tools (Kent et al. (2002) Genome Res. 12(6):996-1006). Genomic regions located in repeat regions greater than 2 Kb long plus a 1 Kb buffer zone on either end of the repeat region (4 kb total) are excluded for specific target site selection. Repeat regions less than 2 Kb long are included in the pool of potential target sites.

[0114] A further step in the target site selection process is to select a region that is lacking in repressive chromatin marks. Histones are the primary protein components of chromatin, and H3K27me3 is a well-known histone H3 modification that is associated with facultatively repressed genes. H3K27me3 levels in corn were identified using the ChIP-seq method followed by Illumina sequencing (Deng, J. et al. (2009) Nat. Biotechnol. 27, 353-360). The sequence of the genomic regions within the selected low diversity haplotype windows are evaluated with MACS software (Zhang et al. (2008) Genome Biol. 9 (9): R137) to identify sequence predicted to have chromatin peaks based on the ChIP-seq analysis. Specific target sites were selected which were greater than or equal to 1 kb away from these repressive chromatin marks.

[0115] Another step in the target site selection process is to select a target site that is within a region with a low redundancy score (less-than or equal to 30%). A redundancy score is a mathematical measure of the likelihood that the sequence is unique in the genome. The redundancy score is calculated by a using a binned k-mer approach where a k-mer window is selected and a scanning window is used to shift the k-mer window 1-nucleotide in the 3′ direction along the entire host genome. The k-mer redundancy count is calculated by summing the number of times there is a perfect nucleotide match (100% sequence identify) for each k-mer sequence in the host genome. A unique k-mer has a redundancy count equal to 1, as this nucleotide sequence occurs exactly once in the reference genome. A redundant k-mer has a redundancy count of greater than 1, as this nucleotide sequence occurs more than once in the reference genome.

[0116] The total redundancy score for a selected genomic region is calculated as the percent of redundant k-mers present in a specific genomic region. For example, a total redundancy score for genomic region at least 1000 nucleotides long is selected for analysis, and the total number of unique k-mers (k-mer redundancy count of 1) vs. redundant k-mers (k-mer redundancy count greater than 1) are calculated. The total number of k-mers within the 1000 nucleotide region is equal to (1000-k), where k is the number of nucleotides in each k-mer. The total redundancy score is calculated as the number of redundant k-mers in a region, divided by the total number of k-mers in that region, multiplied by 100. A total redundancy score of 30% indicates that at least 70% of the k-mers in the genomic region are unique.

[0117] Another step in the target site selection process is to select sites within low DNA methylation regions. DNA methylation is a common epigenetic mechanism to reduce gene expression. DNA methylation has been reported to interfere with TALEN activity (Bultmann S., et al. (2012) Targeted transcriptional activation of silent oct4 pluripotency gene by combining designer TALEs and inhibition of epigenetic modifiers. Nucleic Acids Res. 40, 5368-5377). DNA methylation regions were identified by digesting corn genomic DNA with a cocktail of DNA-methylation sensitive enzymes per supplier protocols (New England Biolabs, Ipswich, MA). The DNA fragments (20-40 nucleotides long) were extracted, and a DNA library was prepared using the ThruPLEX-FD® DNA-seq kit (Rubicon Genomics, Ann Arbor, MI). Next, libraries were sequenced using the TruSeq® DNA Methylation kit (Illumina Inc., San Diego, CA), and DNA methylation reads were mapped to their corresponding loci on the corn genome. Genomic loci associated with a cluster of overlapping but non-identical reads that represent 10% of genome wide population average are classified as DNA methylated regions and were excluded from target site selection. In other examples, a cluster of at least four overlapping but non-identical reads were classified as a DNA methylated region and were excluded from target site selection.

[0118] Another step in the target site selection process is to select target sites≥200 bp away from a small RNA (sRNA) hotspot, where a sRNA hotspot is a region with high sRNA abundance. A sRNA hotspot may function as sRNA binding sites if this region of the genome is included in pre-mRNA transcripts generated during transcription of genes (mRNA transcripts from either endogenous genes or from transgene cassettes) in the vicinity of sRNA hotspots. To identify sRNA hotspots, germplasm-specific sRNA transcripts 21, 22, and 24nucleotides long, with calculated abundances at least 1 RPM (read per million), are mapped to the genomic sequence to identify regions of high sRNA abundance (Heisel et al., (2008) PLOS ONE 3(8) 1-10). For the purpose of genome modification, including site-specific integration of a DNA of interest, the target site selected is positioned≥200 bp away from a small RNA (SRNA) hotspot.

[0119] In some instances, a target site is selected that is in a region (≤200 nucleotides) of an sRNA hotspot. If the target site is selected for integration of a transgene cassette, the orientation of integration of the transgene cassette can be designed such that the sRNA hotspot is in a ‘head-to-head’ orientation with the transgene cassette. This ‘head-to-head’ orientation is where the direction of transcription of the transgene cassette is in the opposite orientation of the direction of transcription of the sRNA hotspot within the genome. This head-to-head orientation will reduce the chance of incorporation of sRNA binding sites during transcription of mRNA from the transgene cassette.

[0120] When the target site is in a region (≤200 nucleotides) of an sRNA hotspot and the target site is selected for homology-dependent integration of a transgene cassette, then design of one or both homology arms of the transgene cassette is done to remove the sRNA hotspot during integration at the target site. Specifically, the homology arms of the transgene cassette are designed to have homology to a genomic within the sRNA hotspot, or flanking on the distal 5′-end (for a 5′ homology arm) or the distal 3′-end (for a 3′ homology arm) of the sRNA hotspot, and during the HR-dependent integration of the transgene cassette the process of homologous recombination effectively truncates and/or deletes the sRNA hotspot from the final transgenic genomic locus.

### Example 2: Site-Specific Genome Modification

[0121] The specific target site identified using the target site selection process detailed in Example 1 is used to inform the process of site-specific genome modification. For example, a site-specific genome modification enzyme delivery system is engineered and delivered to the plant cell.

[0122] In one example, a meganuclease is engineered to bind at the specific target site selected for genome modification. The sequence encoding the meganuclease is cloned into a plant expression vector, and delivered to the plant cell. If the genome modification is designed to induce a double-strand break (DSB) with non-homologous end joining (NHEJ) repair for introduction of insertions and deletions (indels), then just the engineered meganuclease is delivered to the plant cell. If a DNA of interest is to be incorporated at the target site, then the engineered meganuclease and the DNA of interest are co-delivered to the plant cell. The DNA of interest may integrate by NHEJ or by homology-dependent repair (HR). In the latter case, the DNA of interest will have at least one homology arm.

[0123] In another example, a Zinc Finger Nuclease (ZFN) is used to introduce the site-specific genome modification. In this case, the pair of ZFN molecules are designed and cloned into a plant expression vector and delivered to the plant cell. If the genome modification is designed to induce a double-strand break (DSB) with non-homologous end joining (NHEJ) repair for introduction of insertions and deletions (indels), then just the engineered ZFN is delivered to the plant cell. If a DNA of interest is to be incorporated at the target site, then the engineered ZFN and the DNA of interest are co-delivered to the plant cell. The DNA of interest may integrate by NHEJ or by homology-dependent repair (HR). In the latter case, the DNA of interest will have at least one homology arm.

[0124] In another example, a TAL-effector nuclease (TALEN) is used to introduce the site-specific genome modification. In this case, the pair of TALEN molecules are designed and cloned into a plant expression vector and delivered to the plant cell. A variety of tools known to one skilled in the art are available to design a TALEN for optimal activity for a selected target site. One example of a tool for TALEN design is described by Lin et al., (2014) Nucleic Acids Res. 2014 April; 42(6); and U.S. Patent Application Publication 20150132821. If the genome modification is designed to induce a double-strand break (DSB) with non-homologous end joining (NHEJ) repair for introduction of insertions and deletions (indels), then just the engineered TALEN is delivered to the plant cell. If a DNA of interest is to be incorporated at the target site, then the engineered TALEN and the DNA of interest are co-delivered to the plant cell. The DNA of interest may integrate by NHEJ or by homology-dependent repair (HR). In the latter case, the DNA of interest will have at least one homology arm.

[0125] In another example, an Argonaute is used to introduce the site-specific genome modification. In this case, the Argonaute molecule and a DNA guide molecule are designed and cloned into a plant expression vector and delivered to the plant cell. If the genome modification is designed to induce a double-strand break (DSB) with non-homologous end joining (NHEJ) repair for introduction of insertions and deletions (indels), then just the engineered Argonaute and DNA guide molecule are delivered to the plant cell. If a DNA of interest is to be incorporated at the target site, then the engineered Argonaute, DNA guide molecule, and the DNA of interest are co-delivered to the plant cell. The DNA of interest may integrate by NHEJ or by homology-dependent repair (HR). In the latter case, the DNA of interest will have at least one homology arm.

[0126] In another example, a CRISPR system is used to introduce the site-specific genome modification. In this case, the CRISPR associated nuclease and at least one RNA guide molecule are designed and cloned into a plant expression vector and delivered to the plant cell. If the genome modification is designed to induce a double-strand break (DSB) with non-homologous end joining (NHEJ) repair for introduction of insertions and deletions (indels), then just the engineered CRISPR nuclease and at least one RNA guide molecule are delivered to the plant cell. The RNA guide molecule may be a single guide RNA (sgRNA) or the RNA guide molecule may have both a tracer-RNA and guide-RNA component. If a DNA of interest is to be incorporated at the target site, then the engineered CRISPR nuclease, at least one RNA guide molecule, and the DNA of interest are co-delivered to the plant cell. The DNA of interest may integrate by NHEJ or by homology-dependent repair (HR). In the latter case, the DNA of interest will have at least one homology arm. An alternative to delivery of the engineered CRISPR nuclease as a DNA expression construct is the delivery of a Ribonucleo-protein (RNP) complex of the CRISPR associated nuclease protein in complex with the guide RNA.

[0127] Following delivery of the genome modification system to a plant cell, the cells or plants regenerated from the cells are sampled to confirm the presence of the intended site-specific genome modification. Methods of detecting the genome modification are known to one skilled in the art, and include: PCR, TaqMan® PCR, droplet digital PCR (ddPCR™, Bio-Rad Laboratories, Hercules, CA), sequencing, Sanger sequencing, ABI 3730 DNA fragment analysis (Applied Biosystems, Grand Island, NY), Southern analysis, Northern analysis, phenotypic analysis, or any other technique known to one in the art to detect genome modification.

[0128] Example 3: TALEN Target Site Selection in Corn

[0129] The genomic sequences for three separate corn germplasm (B73, 01DKD2, and LH244) were analyzed using the criteria detailed in Example 1 to identify specific target sites for genome modification by TALENs. From the analysis of the chromosome I genomic locus the B73 germplasm (chosen as being in a haplotype window associated with positive agronomic trait of insect resistance), 17 genomic regions containing TALEN targeting sites were identified, represented by SEQ ID NO:140 through SEQ ID NO:156. Using these 17 regions from the B73 germplasm analysis, 16 corresponding genomic regions containing TALEN targeting sites were identified in 01DKD2 germplasm, represented by SEQ ID NO:157 through SEQ ID NO:172. Using the 17 regions from the B73 germplasm analysis, 17 corresponding genomic regions in LH244 germplasm were identified, represented by SEQ ID NO:123 through SEQ ID NO:139. For each of the 17 genomic regions in the LH244 germplasm, there were from one to six separate TALEN target sites per genomic region, with a total of 61 separate TALEN targeting sites selected for testing TALEN activity (see Table 1).

[0130] As one representative example of the target site selection process, a genomic region on corn chromosome 1, represented by SEQ ID NO:130, was chosen initially as being within a haplotype window associated with a transgene insertion event with a positive agronomic trait. This haplotype window was approximately 36 Mb in length and was identified essentially as described in US Patent Pub. No. 20130276173. The relative position of SEQ ID NO: 130 within a 10 kb region of the haplotype window is illustrated in FIG. 2.

[0131] As detailed in Example 1, the genomic sequence within the haplotype window was analyzed for genic and intergenic coordinates. From this analysis, an exon for a gene identified as GRMZM2G138382 was identified within the 10 kb window selected for analysis to identify a TALEN target site. Based on this analysis, and applying the criteria to include/exclude genic regions as detailed in Example 1, a genomic sequence of approximately 5 kb in length, as illustrated in FIG. 2, between Zm.B73 CR01 coordinates 287442 kb to 287447 kb, was selected for further analysis to identify a TALEN target site using additional selection criteria as detailed below.

[0132] As detailed in Example 1, the selected 5 kb genomic sequence was analyzed for regions of repetitive sequence. The reference corn genome for LH244 was analyzed in Genome Browser (Kent et al. (2002) Genome Res. 12(6):996-1006) and known repeat regions occurring within the selected 5 kb sequence were mapped. The analysis window from Genome Browser was inspected to identify repeat regions greater than 2 kb in length. One large repeat occurred within the preselected 10 kb region and this repeat plus 1 kb upstream, illustrated in FIG. 2, Zm.B73 CR01 between coordinates 287445.9 kb to 287229 kb, were excluded from further analysis. Combining the analysis of the haplotype window, the genic/intergenic regions, and the repetitive sequence, a genomic sequence of 3.5 kb (SEQ ID NO:130) was selected as a region to identify a TALEN target site, with the 1.6 kb sequence (SEQ ID NO:299) selected as the optimal region, thus avoiding the endogenous gene plus 2 kb buffer (Zm.B73 CR01 coordinates 287444 kb to 287445.9 kb), as illustrated in FIG. 2. This sequence was selected for further analysis to identify a TALEN target site using additional selection criteria as detailed below.

[0133] As detailed in Example 1, an analysis was done for the presence of repressive chromatin marks, assessed by H3K27me3 peaks. The nearest H3K27me3 peak occurred at the sequence identified by SEQ ID NO:293 (FIG. 2) positioned about 2 kb upstream of the genomic region selected to identify a TALEN target site (SEQ ID NO:299). Therefore, further analysis was done for the region represented by SEQ ID NO:299 to identify a TALEN target site using additional selection criteria as detailed below.

[0134] The genomic sequence (SEQ ID NO:299) was analyzed to identify sRNA binding sites as detailed in Example 1. Within the genomic sequence of the selected site (SEQ ID NO:299), two 24 nt sRNA hotspots were identified. One sRNA hotspot occurred approximately 160 bp upstream of the SEQ ID NO:299, and one sRNA hotspot occurred approximately 1400 bp downstream of the SEQ ID NO:299. Due to the proximity (160 bp) of the upstream sRNA hotspot, a transgene cassette is designed to integrate by homologous recombination into the TALEN target site in a head-to-head orientation relative to this sRNA hotspot. This orientation of the transgene cassette would reduce or eliminate run-on by Pol-II polymerase from extending transcription of the transgene mRNA transcript into the sRNA hotspot. Therefore, sRNA binding sites are not transcribed into the nacent transgene mRNA transcript, thus reducing the potential for sRNA induced transgene silencing.

[0135] As detailed in Example 1, the DNA methylation status within the genomic region was analyzed. Genome-wide DNA methylation profiling was performed by extracting DNA fragments (20-40 nt long) from corn tissue, and preparing a DNA library using the ThruPLEX-FD® DNA-seq kit (Rubicon Genomics, Ann Arbor, MI). The DNA libraries were sequenced using the TruSeq® DNA Methylation kit (Illumina Inc., San Diego, CA), and DNA reads were mapped to the sequences represented as SEQ ID NO:130, and SEQ ID NO:299(FIG. 3). Because DNA methylation interferes with TALEN activity, sequence associated with a cluster of at least four overlapping but not identical reads were classified as a DNA methylation region, and were excluded as a TALEN target site. The DNA methylation profile for SEQ ID NO:130 and SEQ ID NO:299 was highly heterogeneous, with DNA methylation read counts varying from 0-5 MspJI/LPnPI read counts across the genomic region, as illustrated in FIG. 3. Due to the relatively high MspJI/LPnPI read counts overlapping SEQ ID NO:299, a region of 530 bp and represented by SEQ ID NO:294 was selected as the genomic region for TALEN induced genome modification.

[0136] As detailed in Example 1, the region within the selected haplotype window was analyzed for sequence redundancy, with total redundancy scores across the genomic region determined. To calculate the redundancy scores, the haplotype region was binned using an 18 nucleotide k-mer window, and for each k-mer the redundancy score was calculated. The total redundancy score for the target region was then calculated from the individual k-mer redundancy scores, as described in Example 1. The total redundancy score for SEQ ID NO:130 was 28, marginally below the preferred cut-off value of 30. Upon visual inspection of the entire length of the 530 bp region represented by SEQ ID NO:294, this region had a total redundancy score that was≤8, a value much lower than the cut-off value of 30. The position of the genomic sequences corresponding to SEQ ID NO:130, SEQ ID NO:299, and SEQ ID NO:294 relative to the redundancy score is illustrated in FIG. 2, of the genomic regions.

[0137] The final step of the TALEN site selection process was to repeat the redundancy score analysis to identify sequence of at least 200 bp, and that had a total redundancy score of less than 10. This step was added to ensure high TALEN nuclease specificity at the selected target site.

[0138] For the entire genomic sequence of corn LH244 germplasm in the haplotype window on chromosome 1 described above, the process to select multiple TALEN target sites was completed largely as described above. This TALEN site selection process identified 61 separate TALEN target sites, represented in 17 genomic sequences (SEQ ID NO:123-139). For each of the 17 genomic sequences, there were from one to six separate specific TALEN targeting sites. A TALEN target site included a 5′-TALEN binding site, a spacer sequence, and a 3′TALEN binding site. Each of the TALEN binding sites were 15 to 24 bp long, and the spacer sequence was 18 to 25 bp long. Within the spacer sequence is the site of the DSB induced by the TALEN, and the site of incorporation of indels or incorporation of a DNA of interest by either NHRJ or HR. The SEQ ID NOs for the 5′-TALEN binding site and 3′-TALEN binding site corresponding to each of the 61 TALEN target sites are represented in Table 1.

TABLE 1
TALEN activity measured by DNA integration at
individual LH244 TALEN target sites.

| Genomic | 5′ TALEN | 3′ TALEN | TALEN activity |
|---|---|---|---|
| region | binding site | binding site | for DNA integration |
| SEQ ID NO: | SEQ ID NO: | SEQ ID NO: | (active/not active) |
| 123 | 5 | 64 | active |
| 123 | 6 | 65 | active |
| 123 | 7 | 66 | active |
| 123 | 8 | 67 | active |
| 124 | 9 | 68 | not active |
| 124 | 10 | 69 | not active |
| 124 | 11 | 70 | active |
| 124 | 12 | 71 | active |
| 125 | 13 | 72 | active |
| 125 | 14 | 73 | active |
| 125 | 15 | 74 | active |
| 126 | 16 | 75 | active |
| 126 | 17 | 76 | active |
| 126 | 18 | 77 | active |
| 126 | 19 | 78 | active |
| 127 | 20 | 79 | not active |
| 127 | 21 | 80 | active |
| 127 | 22 | 81 | active |
| 127 | 23 | 82 | not active |
| 128 | 24 | 83 | active |
| 128 | 25 | 84 | active |
| 128 | 26 | 85 | active |
| 128 | 27 | 86 | active |
| 129 | 28 | 87 | active |
| 129 | 29 | 88 | not active |
| 129 | 30 | 89 | not active |
| 129 | 31 | 90 | active |
| 130 | 32 | 91 | active |
| 130; 299 | 33 | 92 | active |
| 130; 299 | 34 | 93 | active |
| 130; 299; 294 | 35 | 94 | active |
| 131 | 295 | 296 | not active |
| 131 | 297 | 298 | not active |
| 131 | 36 | 95 | active |
| 131 | 37 | 96 | active |
| 131 | 38 | 97 | not active |
| 131 | 39 | 98 | active |
| 132 | 40 | 99 | not active |
| 132 | 41 | 100 | active |
| 132 | 42 | 101 | active |
| 132 | 43 | 102 | active |
| 133 | 44 | 103 | active |
| 133 | 45 | 104 | not active |
| 133 | 46 | 105 | not active |
| 134 | 47 | 106 | not active |
| 134 | 48 | 107 | not active |
| 134 | 49 | 108 | active |
| 135 | 50 | 109 | active |
| 136 | 51 | 110 | active |
| 136 | 52 | 111 | active |
| 136 | 53 | 112 | not active |
| 136 | 54 | 113 | not active |
| 137 | 55 | 114 | active |
| 137 | 56 | 115 | active |
| 137 | 57 | 116 | active |
| 138 | 58 | 117 | active |
| 138 | 59 | 118 | active |
| 138 | 60 | 119 | not active |
| 138 | 61 | 120 | not active |
| 139 | 62 | 121 | not active |
| 139 | 63 | 122 | active |

[0139] To assess TALEN activity at each of these TALEN target sites, a TALEN was engineered to bind at each of the 5′-and 3′-TALEN binding sites. For example, within the genomic region corresponding to SEQ ID NO:130, four TALEN target sites were tested having TALEN binding sites: (1) SEQ ID NO:32 and SEQ ID NO:91; (2) SEQ ID NO:33 and SEQ ID NO: 92; (3) SEQ ID NO:34 and SEQ ID NO:93; and (4) SEQ ID NO:35 and SEQ ID NO:94. Within the genomic region corresponding to SEQ ID NO:299, three TALEN target sites were tested having TALEN binding sites: (1) SEQ ID NO:33 and SEQ ID NO:92; (2) SEQ ID NO:34 and SEQ ID NO:94; and (3) SEQ ID NO:35 and SEQ ID NO:94. Within the genomic region corresponding to SEQ ID NO:294, a single TALEN target site was tested having TALEN binding sites SEQ ID NO:35 and SEQ ID NO:94. The assay used to evaluate TALEN activity was integration of a blunt-end, double-stranded DNA (dsDNA) fragment into the DSB created by the TALEN pair at the specific target sites. Individual expression vectors were generated to contain an expression cassette for each TALEN of the TALEN pair to be evaluated. Two expression vectors (one each for the 5′-and 3′-TALEN binding site) were introduced into isolated corn leaf protoplasts essentially as described in patent application publication WO2015131101, with minor modifications. Briefly, complementary ssDNA oligonucleotides (SEQ ID NO:1 and SEQ ID NO:2) were pre-annealed to form a blunt-end, double-stranded DNA (dsDNA) fragment. Transformations of isolated corn leaf protoplasts were performed using standard PEG-protocol, with 50 pmoles of the dsDNA fragment, and two expression vectors (0.1 pmole each), one for each TALEN of the TALEN pair. Protoplast samples transformed in the presence of the dsDNA fragment alone, or with TALEN plasmids lacking dsDNA fragment, were used as negative controls. The experimental groups contained both TALEN pairs for the specific TALEN target site and the dsDNA fragment. The corn protoplasts were harvested 48 hour after transformation, and the genomic DNA was assayed for integration of the dsDNA fragment. Integration of the dsDNA fragment into the genomic DNA was detected using droplet digital PCR (ddPCR) (Bio-Rad Laboratories, Hercules, CA), or by standard PCR and agarose gel electrophoresis to assess PCR amplicons. The dsDNA fragment may have integrated in either a 5′ or 3′ orientation with respect to the 5′-and 3′-ends of the DSB. Therefore, at least two PCR primer sets were run for each TALEN target site where the primer sets contained a primer specific to the dsDNA fragment (SEQ ID NO:3), and a primer specific to either the 5′ side or the 3′ side of the DSB. For the ddPCR, a TaqMan® probe (SEQ ID NO: 4) was included in the PCR reaction mixture. Transformation efficiency of protoplasts was calculated using a control plasmid expressing green fluorescent protein using the method described in patent application publication WO2015131101. TALEN pairs that showed statistically significant integration of targeted dsDNA fragments were identified as active (scc Table 1).

[0140] Selection of TALEN target sites that did not overlap DNA methylation regions significantly improved integration of dsDNA fragments into the corn protoplast genome. A comparison of relative DNA methylation region at four separate TALEN target sites and the corresponding percent integration for each of the four TALEN target sites determined in the protoplast assay is shown in FIG. 4. For this comparison, two of the four TALEN target sites, within genomic region SEQ ID NO:130, contain the TALEN binding pairs: SEQ ID NO:34and SEQ ID NO:93; and SEQ ID NO:35 and SEQ ID NO:94; and two of the four TALEN target sites, within genomic region SEQ ID NO:131, contain the TALEN binding pairs: SEQ ID NO:295 and SEQ ID NO:296; and SEQ ID NO:297 and SEQ ID NO:298. The percent integration of the dsDNA fragment into the TALEN target site for the test samples with either TALEN binding pair SEQ ID NO:34 and SEQ ID NO:93 (approximately 7%) or SEQ ID NO:35 and SEQ ID NO:94 (approximately 16%) was significantly higher than the controls for these sites. In contrast, the percent integration of the dsDNA fragment into the TALEN target site for the test samples with either TALEN binding pair SEQ ID NO:295 and SEQ ID NO:296(approximately 2%) or SEQ ID NO:297 and SEQ ID NO:298 (approximately 0%) was not significantly different than the controls for these sites (FIG. 4). The DNA methylation for each of these specific TALEN target sites is presented in FIG. 4. The two TALEN target sites with TALEN binding pair SEQ ID NO:34 and SEQ ID NO:93 or TALEN binding pair SEQ ID NO:35 and SEQ ID NO:94 are located in relatively unmethylated regions. The two TALEN target sites with TALEN binding pair SEQ ID NO:295 and SEQ ID NO:296 or TALEN binding pair SEQ ID NO:297 and SEQ ID NO:298 are located in methylated regions (FIG. 4). These data illustrate that selecting TALEN target sites within genomic regions lacking DNA methylation increases the integration frequency of dsDNA into the TALEN target site.

### Example 4: TALEN Target Site Selection in Soy

[0141] The genomic sequence of Glycine max (germplasm A3555) was screened as detailed in Example 1 to identify optimal sites for genome modification, specifically to select TALEN target sites. From this analysis, 14 genomic regions were identified to contain TALEN target sites. For each genomic region, there were from one to 5 individual TALEN target sites identified for a total of 39 TALEN target sites (see Table 2). For each TALEN target site, the SEQ ID NO: corresponding each 5′-and 3′-TALEN binding site is presented in Table 2.

[0142] As one representative example of the target site selection process in soy, a genomic region on soy chromosome 2 (CR02), represented by SEQ ID NO:257, was chosen initially as being within a favorable haplotype window associated with a transgene insertion event with a positive agronomic trait for insect resistance. Although this genomic region was intergenic, after additional analysis no specific site was identified as a TALEN target site that met all of the selection criteria detailed in Example 1. Therefore, the region was reanalyzed with relaxed criteria for redundancy score and DNA methylation profile to select a TALEN target site.

[0143] Redundancy scores for the selected genomic region were calculated as detailed in Example 1 using an 18 bp k-mer scanning window. The resulting k-mer redundancy scores were mapped to the haplotype window, and their distribution was scanned to identify genomic regions of at least 1 Kb long that had a total redundancy score of≤30%. No region of SEQ ID NO:257 met this selection criteria (FIG. 5). Therefore, the region was reanalyzed, and the preference for a 1 Kb region was relaxed to identify regions of at least 100 bp that had a total redundancy score of≤30%. Within the heterogeneous 9.6 kb region, several 100 bp stretches with total redundancy scores≤30% were interspersed between peaks of high sequence redundancy. These short, low redundancy sections formed the population from which TALEN target sites were selected.

[0144] The low redundancy stretches were further analyzed to identify regions that lacked DNA methylation. DNA methylation was determined for the soy genome essentially as described in Example 3, and DNA methylation reads were mapped across the 9.6 kb region of SEQ ID NO:257. Similar to the total redundancy scores, the DNA methylation reads were heterogeneously distributed across the region (FIG. 5). Mapping the DNA methylation profiles across the population of short, low redundancy regions identified a 1 kb region (FIG. 6, SEQ ID NO:554) with one or more 150 bp regions meeting the relaxed criteria for redundancy and DNA methylation. Three TALEN target sites within SEQ ID NO:554 were selected, corresponding to 5′-and 3′-TALEN binding sites (a) SEQ ID NO:233 and SEQ ID NO:234; (b) SEQ ID NO:235 and SEQ ID NO:236; and (c) SEQ ID NO:237 and SEQ ID NO:238 (Table 2); with the relative position of all three TALEN binding sites illustrated by the thick horizontal line in FIG. 6.

[0145] For each of the TALEN target sites identified, TALEN pairs were engineered and TALEN activity was determined as described in Example 3, except using soy protoplasts for the assay. TALEN activity for each of the TALEN target sites assessed with the soy protoplast assay was determined by ddPCR, or by standard PCR with amplicon analysis by agarose gel electrophoresis (Table 2). In Table 2, if either ddPCR or the standard PCR was positive, then the TALEN activity was scored as active. If both assay results were negative for a particular TALEN target site, then the TALEN activity was scored as not active.

TABLE 2
TALEN activity measured by DNA integration at
individual soy TALEN target sites.

| Genomic | 5′ TALEN | 3′ TALEN binding | TALEN activity |
|---|---|---|---|
| region | binding site | site | for DNA integration |
| SEQ ID NO: | SEQ ID NO: | SEQ ID NO: | (active/not active) |
| 251 | 173 | 174 | active |
| 251 | 175 | 176 | active |
| 251 | 177 | 178 | active |
| 251 | 179 | 180 | not active |
| 252 | 181 | 182 | active |
| 252 | 183 | 184 | not active |
| 252 | 185 | 186 | not active |
| 252 | 187 | 188 | active |
| 252 | 189 | 190 | not active |
| 253 | 191 | 192 | active |
| 253 | 193 | 194 | not active |
| 253 | 195 | 196 | not active |
| 260 | 197 | 198 | active |
| 260 | 199 | 200 | not active |
| 260 | 201 | 202 | active |
| 262 | 203 | 204 | not active |
| 262 | 205 | 206 | not active |
| 262 | 207 | 208 | not active |
| 266 | 209 | 210 | active |
| 274 | 211 | 212 | not active |
| 274 | 213 | 214 | active |
| 275 | 215 | 216 | active |
| 275 | 217 | 218 | active |
| 281 | 219 | 220 | active |
| 255 | 221 | 222 | active |
| 255 | 223 | 224 | active |
| 255 | 225 | 226 | active |
| 256 | 227 | 228 | active |
| 256 | 229 | 230 | active |
| 256 | 231 | 232 | active |
| 257 | 233 | 234 | active |
| 257 | 235 | 236 | active |
| 257 | 237 | 238 | active |
| 258 | 239 | 240 | active |
| 258 | 241 | 242 | active |
| 258 | 243 | 244 | active |
| 259 | 245 | 246 | not active |
| 259 | 247 | 248 | active |
| 259 | 249 | 250 | active |

[0146] To further confirm the TALEN activity, a subset of the protoplast assay samples were reevaluated for successful integration of the dsDNA fragment into TALEN target sites by standard PCR using multiple primer sets (Table 3). For each PCR primer set, one primer was to sequence flanking the DSB of the TALEN target site, and one primer (SEQ ID NO:3) was specific to the dsDNA fragment integrated into the DSB. The PCR amplicons were separated using standard agarose gel electrophoresis, and the size of each amplicon was confirmed by comparison to a molecular weight marker. DNA samples from protoplast assay negative controls lacked PCR amplicons. A band of the expected size was detected for all three TALEN target sites for SEQ ID NO:257 (Sample #10, 11, and 12, Table 3). Of the 21 samples retested using standard PCR, TALEN activity was consistent between the two assays, standard PCR and ddPCR. These data indicate the utility in the selection process to identify target sites for genome modification in soy.

TABLE 3
PCR confirmation of site directed integration of dsDNA at
TALEN target sites in the soy genome.

| | 5′/3′ TALEN | | Size (bp) of | Expected band |
|---|---|---|---|---|
| | binding site | Primer pair | Expected | Amplified |
| Sample # | SEQ ID NO: | SEQ ID NO: | band | Yes or No |
| 1 | 199/200 | 290/3 | 750 | No |
| 2 | 211/212 | 292/3 | 1100 | No |
| 3 | 191/192 | 289/3 | 500 | Yes |
| 4 | 221/222 | 283/3 | 450 | Yes |
| 5 | 223/224 | 283/3 | 400 | Yes |
| 6 | 225/226 | 283/3 | 500 | Yes |
| 7 | 227/228 | 284/3 | 400 | Yes |
| 8 | 229/230 | 284/3 | 200 | Yes |
| 9 | 231/232 | 284/3 | 330 | Yes |
| 10 | 233/234 | 285/3 | 300 | Yes |
| 11 | 235/236 | 285/3 | 270 | Yes |
| 12 | 237/238 | 285/3 | 220 | Yes |
| 13 | 239/240 | 286/3 | 550 | Yes |
| 14 | 241/242 | 286/3 | 460 | Yes |
| 15 | 243/244 | 286/3 | 460 | Yes |
| 16 | 245/246 | 287/3 | 700 | No |
| 17 | 247/248 | 287/3 | 650 | Yes |
| 18 | 249/250 | 287/3 | 550 | Yes |
| 19 | 209/210 | 291/3 | 400 | Yes |
| 20 | 197/198 | 290/3 | 500 | No |
| 21 | 185/186 | 288/3 | 780 | No |

### Example 5: Analysis of Site Selection Methods

[0147] To evaluate the target site selection process, a population of RO transgenic corn events containing a transgene conferring herbicide tolerance were selected, and the genomic site of the randomly integrated transgene was determined using standard molecular biology and sequencing methods. Only the events with the transgene localized to intergenic regions were selected for the analysis. Additionally, the R0 events received application of herbicide in a greenhouse and were evaluated for herbicide tolerance as measured by the percentage of injury after herbicide application. Only the events with R0 injury scores within the range from 5 (low) to 30 (high) were included in the analysis. The size of the selected R0 population was 319 events. In this analysis, the integration coordinates of the randomly generated events were mapped, and these coordinates were evaluated to identify the number of events which would have been selected by the of site selection process as detailed in Example 1. Through this evaluation, the genomic location of randomly integrated transgene cassette identified 57 events which were within loci which would have been selected by the site selection process as described in Example 1.

[0148] A separate subset of randomly generated events were fertilized to set seed (inbred/hybrid) and the R1 were evaluated for herbicide tolerance in field trials. Analysis was completed for 24 randomly generated events that passed the R0 herbicide tolerance test but failed the field test. R1 plants from 24 events failed the field test with herbicide injury scores of≥30. Review of the 24 genomic integration sites of the R1 events that failed the field trial indicated that none of the sties of transgene integration met the criteria for target site selection detailed in Example 1. This analysis indicates the effectiveness of the target site selection process to identify genomic sequences for site-specific transgene integration that are optimal for agronomic performance of the transgenic trait.

### Example 6: Target Site Selection for Corn B Chromosome Sequence

[0149] The target site selection process essentially as detailed in Example 1 was repeated on a unique assembly of corn B chromosome sequence. The site selection criteria applied during the analysis included analysis of genic/intergenic regions, sequence redundancy, repeat analysis, DNA methhylation profile, and sRNA hotspot determination. From this analysis, 252 sequences (SEQ ID NO:300-551) were identified as potential loci for genome modification.

### Example 7: Validating TALEN Activity via Transgene Integration Into Target Sites in Corn

[0150] Nine genomic regions from the LH244 corn germplasm were selected for further testing of site specific genome modification by TALENs. Specifically, TALENs were engineered to introduce DSBs at loci within these sites to facilitate site-specific integration of a transgene cassette. The selected genomic regions are represented by SEQ IDs 123, 124, 127, 128, 132, 133, 137, 138 and 139. For each region, one TALEN target site was selected for testing TALEN activity. A TALEN target site included a 5′-TALEN binding site, a spacer sequence, and a 3′TALEN binding site. Each of the TALEN binding sites were 15 to 24 bp long, and the spacer sequence was 18 to 25 bp long. Within the spacer sequence is the site of the DSB induced by the TALEN, and the site of incorporation of the transgene cassette. The SEQ ID NOs for the 5′-TALEN binding site and 3′-TALEN binding site corresponding to each of the nine TALEN target sites are represented in Table 4. An expression cassette encoding CP4-EPSPS, which confers tolerance to the herbicide glyphosate, was chosen as the transgene for site-specific integration at the selected loci. The CP4-EPSPS transgene was flanked by homology arms (HA) to promote HR-mediated integration.

[0151] Individual T-DNA vectors comprising the transgene and TALEN pairs were generated for each locus. Each vector comprised two right borders (RBs) that flanked three expression cassettes: an expression cassette encoding the gene (CP4-EPSPS) positioned between a left homology arm and a right homology arm; and two expression cassettes cach encoding half of a TALEN pair created for a specific target site. TALENs were obtained from Life Technologies.

[0152] Approximately 3,800 to 6,800 immature corn embryos were co-cultured with Agrobacterium containing the vectors for 3 days, then moved to callus-induction medium containing 0.1 mM glyphosate as a selection agent. Approximately 30 to 250 regenerated plants were selected for each construct, transferred to plugs, and grown in a greenhouse.

[0153] To confirm TALEN-mediated site-directed integration, genomic DNA was isolated from selected RO plants and flank PCR assays were carried out to identify individual plants comprising CP4-EPSPS cassette insertions at the TALEN target sites. PCR primers were designed such that a product was only produced when the CP4-EPSPS cassette inserted into the selected target region of the corn genome. One PCR primer was designed to bind to genomic DNA flanking the targeted region, and one PCR primer was designed to bind to a sequence within the CP4-EPSPS cassette. Two sets of PCR primers were used, one positioned on the 5′ end of the CP4-EPSPS cassette and one positioned on the 3′ end of the CP4-EPSPS cassette. Following PCR, the PCR products were resolved on agarose gels to identify plants with the correct sized bands for both the 5′ end (5′ flank) and the 3′ end (3′ flank) of the CP4-EPSPS cassette. As tabulated in Table 4, TALEN activity and transgene insertion was observed in target loci 128, 133, 137, 138 and 139. This confirms that among the preselected corn genomic loci, several can be targeted for precise in planta genome modifications including transgene integration.

TABLE 4
TALEN activity measured by transgene integration at
individual LH244 TALEN target sites.

| Genomic | | 3′ TALEN | | # of |
|---|---|---|---|---|
| region | 5′ TALEN | binding site | | events positive |
| SEQ ID | binding site | SEQ ID | # of events | for Flank PCR |
| NO: | SEQ ID NO: | NO: | tested | (5′ or 3′ Flank) |
| 123 | 8 | 67 | 34 | 0 |
| 124 | 12 | 71 | 28 | 0 |
| 127 | 21 | 80 | 138 | 0 |
| 128 | 27 | 86 | 120 | 7 |
| 132 | 42 | 101 | 255 | 0 |
| 133 | 44 | 103 | 80 | 6 |
| 137 | 56 | 115 | 90 | 6 |
| 138 | 59 | 118 | 59 | 16 |
| 139 | 63 | 122 | 169 | 3 |

### Example 8: CRISPR-Cas9 Target Selection and Site-Specific DNA Integration in Corn protoplasts

[0154] After confirming that TALENs can be successfully used to introduce site specific modifications in selected genomic loci in protoplasts (Example 3), a similar assay was carried out to test for CRISPR-Cas9 mediated genome modifications at a pre-selected locus. A genomic sequence of 3.5 kb (SEQ ID NO:130) was chosen as a region to identify a target site, with the 1.6 kb sequence (SEQ ID NO:299) selected as the optimal region, thus avoiding the endogenous gene plus 2 kb buffer (Zm.B73 CR01 coordinates 287444 kb to 287445.9 kb), as illustrated in FIG. 2 and described in Example 3. This sequence was further analyzed and an optimal Cas9 guide RNA target site (SEQ ID NO:555) with a 3′ TGG PAM sequence was identified. A portion of the optimal region (SEQ ID NO:299) comprising sequences flanking the target site (SEQ ID NO:555) and TGG PAM sequence is also disclosed here as SEQ ID NO:556.

[0155] The assay used to evaluate CRISPR-Cas9 activity was integration of a blunt-end, double-stranded DNA (dsDNA) donor into the DSB created by the Cas9 nuclease at the specific target site. The CRISPR/Cas9 nuclease from Streptococcus pyogenes was chosen as the nuclease system. Two expression vectors were generated. One comprised an expression cassette for the Cas9 nuclease and the other comprised an expression cassette for the single-guide RNA designed to target SEQ ID NO:555. The expression vectors were introduced into isolated corn leaf protoplasts essentially as described in Example 3 and in patent application publication WO2015131101, with minor modifications. Briefly, complementary ssDNA oligonucleotides (SEQ ID NO:1 and SEQ ID NO:2) were pre-annealed to form a blunt-end, double-stranded DNA (dsDNA) donor. Transformations of isolated corn leaf protoplasts were performed using standard PEG-protocol, with 50 pmoles of the dsDNA fragment, and the two expression vectors (0.1 pmole cach) (Table 5, Test). Protoplast samples transformed in the presence of the dsDNA donor and the Cas9 plasmid but lacking the guide RNA plasmid; or transformed with the dsDNA fragment and the guide RNA plasmid but lacking the Cas9plasmid were used as negative controls (Table 5, Control 1 and Control 2). The corn protoplasts were harvested 48 hours after transformation, and the genomic DNA was assayed for integration of the dsDNA donor. Integration of the dsDNA donor into the genomic DNA was detected by standard PCR and agarose gel electrophoresis to assess PCR amplicons. The dsDNA donor may be integrated in either a 5′ or 3′ orientation with respect to the 5′-and 3′-ends of the DSB. Therefore, at least two PCR primer sets were run for the target site where the primer sets contained a primer specific to the dsDNA donor (SEQ ID NO:3), and a primer specific to either the 5′ side or the 3′ side of the DSB. Transformation efficiency of protoplasts was calculated using a control plasmid expressing green fluorescent protein using the method described in patent application publication WO2015131101.

[0156] PCR amplicons were separated using standard agarose gel electrophoresis, and the size of each amplicon was confirmed by comparison to a molecular weight marker. As shown in Table 5, a band of the expected size was detected in protoplasts expressing the Cas9, guide RNA and the dsDNA donor (Test) indicating site-directed integration of donor dsDNA at the target site following Cas9-mediated genomic DNA cleavage. DNA samples from protoplasts transformed with the negative controls lacked PCR amplicons (Control 1 and Control 2). To further confirm dsDNA donor integration, the gel-separated PCR amplicons from the Test samples were isolated, cloned via Zero blunt end Topo cloning (Life technologies) and sequenced. Sequence analysis of the target-donor junctions identified two independent integration events. Both events resulted from NHEJ-mediated donor dsDNA integration at the expected Cas9 cleavage site within the targeted genomic region. The results presented here demonstrate that the selected genomic locus is amenable to CRISPR-Cas9 mediated cleavage and site-specific integration of a donor dsDNA construct.

TABLE 5
Cas9 activity measured by DNA integration at
a specific target site in LH244 protoplasts.

| | Genomic | Target | | | | Expected |
|---|---|---|---|---|---|---|
| | region | site | | | Donor | band |
| | selected for | SEQ ID | Cas 9 | sg | oligonu- | amplified |
| Assay | targeting | NO: | Nuclease | RNA | cleotide | (Yes/No) |
| Test | SEQ ID | SEQ ID | + | + | + | Yes |
| | 130; 299 | 555 | | | | |
| Control- | SEQ ID | SEQ ID | + | − | + | No |
| 1 | 130; 299 | 555 | | | | |
| Control- | SEQ ID | SEQ ID | − | + | + | No |
| 2 | 130; 299 | 555 | | | | |

### Example 9: CRISPR-Cas9 Mediated Site-Specific DNA Integration at a Selected Target Site in Corn Embryos

[0157] After confirming that CRISPR-Cas9 could be successfully used to introduce site specific modifications in a selected genomic locus in a protoplast assay system, a similar assay was carried out in corn immature embryos. As described in Example 6, an optimal Cas9 gRNA target site (SEQ ID NO:555) was identified within a selected genomic locus (SEQ ID NOs:130 and 299).

[0158] The assay used to evaluate CRISPR-Cas9 activity was integration of a blunt-end, double-stranded DNA (dsDNA) donor oligo into the DSB created by the Cas9 nuclease at the selected target site. The CRISPR/Cas9 nuclease from Streptococcus pyogenes was expressed in E.coli and purified. The complementary ssDNA oligonucleotides (SEQ ID NO:1 and SEQ ID NO:2) were pre-annealed to form a blunt-end, double-stranded DNA (dsDNA) donor. The purified Cas9 protein, in-vitro synthesized guide RNA and the dsDNA donor were co-delivered into LH244 immature corn embryos via biolistics. Genomic DNA was extracted from the bombarded embryos after 48 hours and assayed for integration of the dsDNA donor. DNA extracted from untransformed embryos was used as a control.

[0159] As described in Example 8, integration of the dsDNA donor into the genomic DNA was detected by standard PCR and agarose gel electrophoresis to assess PCR amplicons. The dsDNA donor may be integrated in either a 5′ or 3′ orientation with respect to the 5′-and 3′-ends of the DSB. Therefore, at least two PCR primer sets were run for the target site where the primer sets contained a primer specific to the dsDNA donor (SEQ ID NO:3), and a primer specific to either the 5′ side or the 3′ side of the DSB. PCR amplicons were separated using standard agarose gel electrophoresis, and the size of each amplicon was confirmed by comparison to a molecular weight marker.

[0160] As shown in Table 6, a band of the expected size was detected in samples prepared from embryos bombarded with the Cas9, the guide RNA, and the dsDNA donor indicating site-directed integration of donor dsDNA at the target site following Cas9 mediated genomic DNA cleavage (Table 6, Test). No PCR product was detected in samples from untransformed tissue (Table 6, Control). To further confirm donor oligo integration, the gel-separated PCR amplicons were isolated, cloned via Zero blunt end Topo cloning (Life technologies) and sequenced. Sequence analysis of the target-donor junctions identified one independent integration event. This event resulted from NHEJ-mediated donor dsDNA integration at the expected Cas9 cleavage site within the targeted genomic region. The results presented here demonstrate that the selected genomic locus is amenable to CRISPR-Cas9mediated cleavage and site-specific integration of a donor dsDNA construct in corn embryogenic tissue. Taken together, results from Example 3, Example 7, Example 8 and Example 9 demonstrate that a locus selected according to criteria described in Example 1 can be precisely and reproducibly modified by multiple sequence specific endo-nucleases in multiple cell types for integration of donor DNA.

TABLE 6
Cas9 activity measured by DNA integration at
a specific target site in LH244 embryogenic tissue.

| | Genomic | | | | | Expected |
|---|---|---|---|---|---|---|
| | region | | | | Donor | band |
| | selected for | Target | | sg | oligonu- | amplified |
| Assay | targeting | site | Nuclease | RNA | cleotide | (Yes/No) |
| Test | SEQ ID | SEQ ID | + | + | + | Yes |
| | 130; 299 | 555 | | | | |
| Control | SEQ ID | SEQ ID | − | − | − | No |
| | 130; 299 | 555 | | | | |

What is claimed is:

1. A recombinant sequence comprising a non-genic plant genomic sequence and a DNA of interest, wherein the DNA of interest is integrated into a target site in the non-genic plant genomic sequence, and wherein the target site is located in a haplotype window associated with a neutral to positive impact on one or more agronomic traits, wherein the target site is further located at genetic distance greater than 1 cM of a haplotype window that is associated with a negative impact on one or more agronomic traits and wherein the non-genic plant genomic sequence is a corn genomic sequence selected from the group consisting of SEQ ID NOs: 123-172, 294, 299-551, 555 and 556 or a soybean genomic sequence selected from the group consisting of SEQ ID NOs:252-282 and 554.

2. The recombinant sequence of claim 1, wherein the target site is located less than 1000 bp of low genetic diversity, wherein low genetic diversity is defined as having from one to ten distinguishable haplotypes across all germplasm in the intended heterotic group, the intended maturity group, or the intended heterotic and maturity group.

3. The recombinant sequence of claim 1, wherein the haplotype window is between 40 base pairs and the full length of the chromosome, with at least 99% sequence similarity across targeted germplasm and contains two or fewer indels of transposon size (˜3kb).

4. The recombinant sequence of claim 1, wherein the haplotype window is defined by genetic distance and wherein the genetic distance is 0.1 cM, 0.2 cM, 0.3 cM, 0.4 cM, 0.5 CM, 0.6 cM, 0.7 cM, 0.8 CM, 0.9 cM, 1 cM, 1.1 cM, 1.2 cM, 1.3 cM, 1.4 cM, 1.5 CM, 1.6 cM, 1.7 cM, 1.8 CM, 1.9 cM, 2 cM, 2.1 cM, 2.2 cM, 2.3 cM, 2.4 cM, 2.5 CM, 2.6 cM, 2.7 CM, 2.8 CM, 2.9 cM, 3 cM, 3.1 cM, 3.2 cM, 3.3 cM, 3.4 cM, 3.5 CM, 3.6 cM, 3.7 cM, 3.8 CM, 3.9 cM, 4 cM, 4.1 cM, 4.2 cM, 4.3 cM, 4.4 cM, 4.5 CM, 4.6 cM, 4.7 cM, 4.8 cM, 4.9 cM, or 5 cM.

5. The recombinant sequence of claim 1, wherein the agronomic trait is one or more selected from the group consisting of: yield, ear relative maturity, ear height, ear number, increased ear size, grain moisture, increased ear dry weight per plant, increased number of kernels per ear, increased weight per kernel, increased number of kernels per plant, decreased ear void, extended grain fill period, test weight, pod number, number of seed per pod, pod position on the plant, number of internodes, incidence of pod shatter, grain size, decreased days from planting to maturity, increased stalk size, increased number of leaves, increased plant height growth rate in vegetative stage, plant architecture, resistance to lodging, percent seed germination, seedling vigor, juvenile traits, efficiency of germination (including germination in stressed conditions), growth rate (including growth rate in stressed conditions), increased number of root branches, increased total root length, efficiency of nodulation and nitrogen fixation, enhanced nitrogen use efficiency, increased water use efficiency as compared to a control plant, efficiency of nutrient assimilation, resistance to biotic and abiotic stress, carbon assimilation, physiology, enhanced disease or pest resistance, or environmental or chemical tolerance, enhanced cold tolerance, nutritional enhancement, enhanced seed protein, enhanced seed starch, enhanced seed oil, plant height, enhanced plant morphology, growth and development, and stay green rating.

6.-8. (canceled).

9. The recombinant sequence of claim 1, wherein the target site comprises at least 10, at least 15, at least 20, at least 25, at least 30, at least 35, at least 40, at least 45, at least 50, at least 55, at least 60, at least 65, at least 70, at least 75, at least 80, at least 85, at least 90, at least 95, at least 100, at least 150, at least 200, at least 300, at least 400, at least 500, at least 600, at least 700, at least 800, at least 900, or at least 1000 nucleotides.

10. The recombinant sequence of claim 1, wherein the target site comprises one or more, two or more, three or more, four or more, five or more, six or seven of the criteria selected from the group consisting of:
i. the target site is located greater than 2 kb from a 5′ or a 3′ end of a gene in the plant genome;
ii. the target site is located more than 1 kb from a 5′ or a 3′ end of a repeat region in the plant genome, and wherein the repeat region is at least 2 kb in length;
iii. the target site is located more than 1 kb from a 5′ or a 3′ end of a repressive chromatin mark in the plant genome;
iv. the target site is located more than 200 bases from a small RNA (sRNA) hotspot in the plant genome, and wherein the sRNA hotspot is a sequence from 0.2 to 1 kb in length;
v. the target site is within a region of the plant genome of low DNA methlyation;
vi. the target site is not within a region of the plant genome associated with at least one DNA methylation read containing an MspJi motif or a LpnPI motif;
vii. the target site is within a region of the plant genome that exhibits a total k-mer redundancy score of less than or equal to 30%.

11. The recombinant sequence of claim 1, wherein the DNA of interest comprises a gene expression cassette comprising a sequence selected from an insecticidal resistance gene, a herbicide tolerance gene, a nitrogen use efficiency gene, a water use efficiency gene, a nutritional quality gene, a DNA binding gene, a selectable marker gene, and any combination thereof.

12. A method of making a transgenic plant cell comprising a DNA of interest targeted to at least one non-genic plant genomic sequence, the method comprising:
i. selecting a target site located within a haplotype window associated with a neutral to positive impact on one or more agronomic traits;
ii. introducing a site-specific genome modification enzyme into a plant cell, wherein the site-specific genome modification enzyme cleaves the target site in the non-genic plant genomic sequence;
iii. introducing a DNA of interest;
iv. targeting the DNA of interest to the target site, wherein the cleavage of the target site facilitates integration of the DNA of interest into the non-genic plant genomic sequence; and
v. selecting transgenic cells comprising the DNA of interest integrated into the non-genic plant genomic sequence, wherein the non-genic plant genomic sequence is a corn genomic sequence selected from the group consisting of SEQ ID NOs: 123-172, 294, 299-551, 555 and 556 or a soybean genomic sequence selected from the group consisting of SEQ ID NOs:252-282 and 554.

13. The method of claim 12, wherein the target site is further located at a genetic distance of greater than 10 cM of a haplotype window that is associated with a negative impact on one or more agronomic traits.

14. The method of claim 12, wherein the genetic distance of the haplotype window is 0.1 cM, 0.2 cM, 0.3 cM, 0.4 cM, 0.5 CM, 0.6 cM, 0.7 CM, 0.8 CM, 0.9 cM, 1 cM, 1.1 cM, 1.2 cM, 1.3 cM, 1.4 cM, 1.5 CM, 1.6 cM, 1.7 CM, 1.8 cM, 1.9 cM, 2 CM, 2.1 cM, 2.2 cM, 2.3 cM, 2.4 cM, 2.5 CM, 2.6 cM, 2.7 cM, 2.8 CM, 2.9 cM, 3 CM, 3.1 cM, 3.2 cM, 3.3 cM, 3.4 cM, 3.5 cM, 3.6 cM, 3.7 cM, 3.8 cM, 3.9 cM, 4 cM, 4.1 cM, 4.2 cM, 4.3 cM, 4.4 cM, 4.5 CM, 4.6 cM, 4.7 cM, 4.8 cM, 4.9 cM, or 5 cM.

15. The method of claim 12, wherein the agronomic trait is one or more selected from the group consisting of: yield, ear relative maturity, ear height, ear number, increased ear size, grain moisture, increased ear dry weight per plant, increased number of kernels per ear, increased weight per kernel, increased number of kernels per plant, decreased ear void, extended grain fill period, test weight, pod number, number of seed per pod, pod position on the plant, number of internodes, incidence of pod shatter, grain size, decreased days from planting to maturity, increased stalk size, increased number of leaves, increased plant height growth rate in vegetative stage, plant architecture, resistance to lodging, percent seed germination, seedling vigor, juvenile traits, efficiency of germination (including germination in stressed conditions), growth rate (including growth rate in stressed conditions), increased number of root branches, increased total root length, efficiency of nodulation and nitrogen fixation, enhanced nitrogen use efficiency, increased water use efficiency as compared to a control plant, efficiency of nutrient assimilation, resistance to biotic and abiotic stress, carbon assimilation, physiology, enhanced disease or pest resistance, or environmental or chemical tolerance, enhanced cold tolerance, nutritional enhancement, enhanced seed protein, enhanced seed starch, enhanced seed oil, plant height, enhanced plant morphology, growth and development, and stay green rating.

16.-18. (canceled)

19. The method of claim 12, wherein the target site comprises one or more, two or more, three or more, four or more, five or more, six or seven of the criteria selected from the group consisting of:
i. the target site is located greater than 2 kb from a 5′ or a 3′ end of a gene in the plant genome;
ii. the target site is located more than 1 kb from a 5′ or a 3′ end of a repeat region in the plant genome, and wherein the repeat region is at least 2 kb in length;
iii. the target site is located more than 1 kb from a 5′ or a 3′ end of a repressive chromatin mark in the plant genome;
iv. the target site is located more than 200 bases from a small RNA (sRNA) hotspot in the plant genome, and wherein the sRNA hotspot is a sequence from 0.2 to 1 kb in length;
v. the target site is within a region of the plant genome of low a DNA methylation;
vi. the target site is not within a region of the plant genome associated with at 20 least one DNA methylation read sequence containing an MspJi motif or a LpnPI motif; and
vii. the target site is within a region of the plant genome that exhibits a total k-mer redundancy score of less than or equal to 30%.

20. The method of claim 12, wherein the target site comprises at least 10, at least 15, at least 20, at least 25, at least 30, at least 35, at least 40, at least 45, at least 50, at least 55, at least 60, at least 65, at least 70, at least 75, at least 80, at least 85, at least 90, at least 95, at least 100, at least 150, at least 200, at least 300, at least 400, at least 500, at least 600, at least 700, at least 800, at least 900, or at least 1000 nucleotides.

21. The method of claim 12, wherein said DNA of interest comprises a gene expression cassette comprising a sequence selected from an insecticidal resistance gene, a herbicide tolerance gene, a nitrogen use efficiency gene, a water use efficiency gene, a nutritional quality gene, a DNA binding gene, a selectable marker gene, and any combination thereof.

22. The method of claim 12, wherein the site-specific genome modification enzyme is selected from an endonuclease, a recombinase, a transposase, and any combination thereof.

23. The method of claim 22, wherein the endonuclease is selected from a meganuclease, a zinc finger nuclease, a transcription activator-like effector nuclease (TALEN), a Cas9 nuclease, and a Cpf1 nuclease.

24. The method of claim 22, wherein the recombinase is a tyrosine recombinase attached to a DNA recognition motif, or a serine recombinase attached to a DNA recognition motif.

25. The method of claim 24, wherein the tyrosine recombinase attached to a DNA recognition motif is selected from the group consisting of a Cre recombinase, a Flp recombinase, and a Tnp 1 recombinase.

26. The method of claim 24, wherein the serine recombinase attached to a DNA recognition motif is selected from the group consisting of a PhiC31 integrase, an R4 integrase, and a TP-901 integrase.

27. The method of claim 22, wherein the transposase is a DNA transposase attached to a DNA binding domain.

28. The method of claim 23, wherein the transcription activator-like effector nuclease (TALEN) DNA binding site within the target site of com genomic sequence is selected from the SEQ ID NOs presented in Table 1.

29. The method of claim 23, wherein the transcription activator-like effector nuclease (TALEN) DNA binding site within the target site of soybean genomic sequence is selected from the SEQ ID NOs presented in Table 2.

30. The method of claim 12, wherein the DNA of interest is an exogenous sequence.

31. The method of claim 12, wherein the DNA of interest is integrated into the target site via a non-homologous end joining.

32. The method of claim 12, wherein the DNA of interest is integrated into the target site via a homologous recombination.

33. A plant, plant cell, or plant part comprising the recombinant sequence of claim 1.

The application's sequence listing, which the Patent Office published only in electronic form, follows.

SEQUENCE LISTING (556 sequences)

SEQ ID NO: 1 - DNA, 90 bp, synthetic construct
  misc_feature 1..90: note = synthetic oligonucleotide
  source 1..90: mol_type = other DNA
ttaagggataacagggtaatatagcgtaactataacggtcctaaggtagcgaattacgatacaaggctacctagcttcgcagttacgcta

SEQ ID NO: 2 - DNA, 90 bp, synthetic construct
  misc_feature 1..90: note = synthetic oligonucleotide
  source 1..90: mol_type = other DNA
tagcgtaactgcgaagctaggtagccttgtatcgtaattcgctaccttaggaccgttatagttacgctatattaccctgttatcccttaa

SEQ ID NO: 3 - DNA, 25 bp, synthetic construct
  misc_feature 1..25: note = synthetic oligonucleotide
  source 1..25: mol_type = other DNA
ccttgtatcgtaattcgctacctta

SEQ ID NO: 4 - DNA, 20 bp, synthetic construct
  misc_feature 1..20: note = synthetic oligonucleotide
  source 1..20: mol_type = other DNA
ctatattaccctgttatccc

SEQ ID NO: 5 - DNA, 25 bp, Zea mays
  source 1..25: mol_type = unassigned DNA
tatgcttgaggacaattccctgtgt

SEQ ID NO: 6 - DNA, 19 bp, Zea mays
  source 1..19: mol_type = unassigned DNA
tgaggacaattccctgtgt

SEQ ID NO: 7 - DNA, 19 bp, Zea mays
  source 1..19: mol_type = unassigned DNA
tttctgctttctagattcc

SEQ ID NO: 8 - DNA, 19 bp, Zea mays
  source 1..19: mol_type = unassigned DNA
ttcataatccccttcaaac

SEQ ID NO: 9 - DNA, 25 bp, Zea mays
  source 1..25: mol_type = unassigned DNA
tatgctgccaacaatgatatattct

SEQ ID NO: 10 - DNA, 19 bp, Zea mays
  source 1..19: mol_type = unassigned DNA
ttagtgacctcttagttaa

SEQ ID NO: 11 - DNA, 19 bp, Zea mays
  source 1..19: mol_type = unassigned DNA
ttcacccttaatttagttt

SEQ ID NO: 12 - DNA, 19 bp, Zea mays
  source 1..19: mol_type = unassigned DNA
tagatagctacccaattaa

SEQ ID NO: 13 - DNA, 19 bp, Zea mays
  source 1..19: mol_type = unassigned DNA
tgtttgttccttgaacgag

SEQ ID NO: 14 - DNA, 19 bp, Zea mays
  source 1..19: mol_type = unassigned DNA
tctgcatgagcatgttagg

SEQ ID NO: 15 - DNA, 25 bp, Zea mays
  source 1..25: mol_type = unassigned DNA
tcactgaattccgatatgtttgttc

SEQ ID NO: 16 - DNA, 19 bp, Zea mays
  source 1..19: mol_type = unassigned DNA
tgttccttattacaaacac

SEQ ID NO: 17 - DNA, 25 bp, Zea mays
  source 1..25: mol_type = unassigned DNA
taacaacactaatttatcatgacaa

SEQ ID NO: 18 - DNA, 19 bp, Zea mays
  source 1..19: mol_type = unassigned DNA
ttggccatacatgatataa

SEQ ID NO: 19 - DNA, 25 bp, Zea mays
  source 1..25: mol_type = unassigned DNA
tctcaagagcctcgccaaagttttg

SEQ ID NO: 20 - DNA, 19 bp, Zea mays
  source 1..19: mol_type = unassigned DNA
tcagcacacgcatgtttaa

SEQ ID NO: 21 - DNA, 25 bp, Zea mays
  source 1..25: mol_type = unassigned DNA
tctcagacgtcgacagcatgcatat

SEQ ID NO: 22 - DNA, 19 bp, Zea mays
  source 1..19: mol_type = unassigned DNA
tagacgacgacaactgcat

SEQ ID NO: 23 - DNA, 25 bp, Zea mays
  source 1..25: mol_type = unassigned DNA
tcactcgcggctaataattacatcc

SEQ ID NO: 24 - DNA, 19 bp, Zea mays
  source 1..19: mol_type = unassigned DNA
ttgtgcctcacaagaagat

SEQ ID NO: 25 - DNA, 19 bp, Zea mays
  source 1..19: mol_type = unassigned DNA
tcaaccaaatgccatatat

SEQ ID NO: 26 - DNA, 25 bp, Zea mays
  source 1..25: mol_type = unassigned DNA
tgtggaactttctatctcttgttct

SEQ ID NO: 27 - DNA, 19 bp, Zea mays
  source 1..19: mol_type = unassigned DNA
tctgccacccttttagcta

SEQ ID NO: 28 - DNA, 20 bp, Zea mays
  source 1..20: mol_type = unassigned DNA
tgtgccgaaggtggtcttgt

SEQ ID NO: 29 - DNA, 19 bp, Zea mays
  source 1..19: mol_type = unassigned DNA
tgtagttcaatatgatcac

SEQ ID NO: 30 - DNA, 19 bp, Zea mays
  source 1..19: mol_type = unassigned DNA
tggatgaaacactatcact

SEQ ID NO: 31 - DNA, 19 bp, Zea mays
  source 1..19: mol_type = unassigned DNA
tagaccaattcataggata

SEQ ID NO: 32 - DNA, 19 bp, Zea mays
  source 1..19: mol_type = unassigned DNA
tggttgtttcttgtaattt

SEQ ID NO: 33 - DNA, 19 bp, Zea mays
  source 1..19: mol_type = unassigned DNA
tcaagtaccgtttggcata

SEQ ID NO: 34 - DNA, 19 bp, Zea mays
  source 1..19: mol_type = unassigned DNA
tcgtgtgactgctcccaaa

SEQ ID NO: 35 - DNA, 19 bp, Zea mays
  source 1..19: mol_type = unassigned DNA
tctcctatcataacgtttg

SEQ ID NO: 36 - DNA, 19 bp, Zea mays
  source 1..19: mol_type = unassigned DNA
tggtccaagcttgcacttt

SEQ ID NO: 37 - DNA, 19 bp, Zea mays
  source 1..19: mol_type = unassigned DNA
tgatggttttcttccaacc

SEQ ID NO: 38 - DNA, 19 bp, Zea mays
  source 1..19: mol_type = unassigned DNA
tcccccaccataccttaga

SEQ ID NO: 39 - DNA, 19 bp, Zea mays
  source 1..19: mol_type = unassigned DNA
tactgcctcccccaccata

SEQ ID NO: 40 - DNA, 19 bp, Zea mays
  source 1..19: mol_type = unassigned DNA
tgaagtcccaagcgttttt

SEQ ID NO: 41 - DNA, 25 bp, Zea mays
  source 1..25: mol_type = unassigned DNA
tctcgccaaatcccggtgatgagcg

SEQ ID NO: 42 - DNA, 25 bp, Zea mays
  source 1..25: mol_type = unassigned DNA
tcacgtgcgctttgcatttttagag

SEQ ID NO: 43 - DNA, 19 bp, Zea mays
  source 1..19: mol_type = unassigned DNA
tccactctagagtagagtt

SEQ ID NO: 44 - DNA, 19 bp, Zea mays
  source 1..19: mol_type = unassigned DNA
tctaaaaataacaagcaaa

SEQ ID NO: 45 - DNA, 19 bp, Zea mays
  source 1..19: mol_type = unassigned DNA
tcttttatatttttctcag

SEQ ID NO: 46 - DNA, 19 bp, Zea mays
  source 1..19: mol_type = unassigned DNA
tctaactaacaaaataagt

SEQ ID NO: 47 - DNA, 19 bp, Zea mays
  source 1..19: mol_type = unassigned DNA
tgttggtaaacagtattga

SEQ ID NO: 48 - DNA, 19 bp, Zea mays
  source 1..19: mol_type = unassigned DNA
tgttggtaaacagtattga

SEQ ID NO: 49 - DNA, 19 bp, Zea mays
  source 1..19: mol_type = unassigned DNA
tgagtgttggtaaacagta

SEQ ID NO: 50 - DNA, 19 bp, Zea mays
  source 1..19: mol_type = unassigned DNA
tgttataagtacattatta

SEQ ID NO: 51 - DNA, 19 bp, Zea mays
  source 1..19: mol_type = unassigned DNA
tcaatgagacaatgacaac

SEQ ID NO: 52 - DNA, 19 bp, Zea mays
  source 1..19: mol_type = unassigned DNA
ttgcaggttcttgaatgtt

SEQ ID NO: 53 - DNA, 19 bp, Zea mays
  source 1..19: mol_type = unassigned DNA
tgttctaagtacaaataaa

SEQ ID NO: 54 - DNA, 19 bp, Zea mays
  source 1..19: mol_type = unassigned DNA
tctgttggcaataattagg

SEQ ID NO: 55 - DNA, 19 bp, Zea mays
  source 1..19: mol_type = unassigned DNA
tctcgaaagccctcttgat

SEQ ID NO: 56 - DNA, 19 bp, Zea mays
  source 1..19: mol_type = unassigned DNA
tgggaaattggtaaggttg

SEQ ID NO: 57 - DNA, 19 bp, Zea mays
  source 1..19: mol_type = unassigned DNA
tacaagctttagccctaat

SEQ ID NO: 58 - DNA, 19 bp, Zea mays
  source 1..19: mol_type = unassigned DNA
tccgcttgtttaaagctaa

SEQ ID NO: 59 - DNA, 19 bp, Zea mays
  source 1..19: mol_type = unassigned DNA
tgataaggcgatagatgct

SEQ ID NO: 60 - DNA, 19 bp, Zea mays
  source 1..19: mol_type = unassigned DNA
tgctccaggattctcattc

SEQ ID NO: 61 - DNA, 19 bp, Zea mays
  source 1..19: mol_type = unassigned DNA
tgcttagatggcaaacatg

SEQ ID NO: 62 - DNA, 19 bp, Zea mays
  source 1..19: mol_type = unassigned DNA
tcatacaattttcaaaccc

SEQ ID NO: 63 - DNA, 19 bp, Zea mays
  source 1..19: mol_type = unassigned DNA
tcccaataataagatgctt

SEQ ID NO: 64 - DNA, 25 bp, Zea mays
  source 1..25: mol_type = unassigned DNA
ttccttcaatagacaaccgaccaag

SEQ ID NO: 65 - DNA, 19 bp, Zea mays
  source 1..19: mol_type = unassigned DNA
tcaatagacaaccgaccaa

SEQ ID NO: 66 - DNA, 19 bp, Zea mays
  source 1..19: mol_type = unassigned DNA
tttgtaattggatccctcg

SEQ ID NO: 67 - DNA, 19 bp, Zea mays
  source 1..19: mol_type = unassigned DNA
tgtataaaaacagccatat

SEQ ID NO: 68 - DNA, 25 bp, Zea mays
  source 1..25: mol_type = unassigned DNA
tgcatcttttttcacttgaaccttg

SEQ ID NO: 69 - DNA, 19 bp, Zea mays
  source 1..19: mol_type = unassigned DNA
tctaactactaactatcaa

SEQ ID NO: 70 - DNA, 19 bp, Zea mays
  source 1..19: mol_type = unassigned DNA
tgtcattttcaacagcatt

SEQ ID NO: 71 - DNA, 19 bp, Zea mays
  source 1..19: mol_type = unassigned DNA
tgttggcagcatagctatt

SEQ ID NO: 72 - DNA, 19 bp, Zea mays
  source 1..19: mol_type = unassigned DNA
tctattgagctcaacacag

SEQ ID NO: 73 - DNA, 19 bp, Zea mays
  source 1..19: mol_type = unassigned DNA
tcaaggaacaaacatatcg

SEQ ID NO: 74 - DNA, 25 bp, Zea mays
  source 1..25: mol_type = unassigned DNA
tgagctcaacacagtatgtttctaa

SEQ ID NO: 75 - DNA, 19 bp, Zea mays
  source 1..19: mol_type = unassigned DNA
tttacctagagatgacaac

SEQ ID NO: 76 - DNA, 25 bp, Zea mays
  source 1..25: mol_type = unassigned DNA
tattactggagtgagcccttgccat

SEQ ID NO: 77 - DNA, 19 bp, Zea mays
  source 1..19: mol_type = unassigned DNA
tcagtaacactaattggca

SEQ ID NO: 78 - DNA, 25 bp, Zea mays
  source 1..25: mol_type = unassigned DNA
tctactttctcttgcttaaatgttg

SEQ ID NO: 79 - DNA, 19 bp, Zea mays
  source 1..19: mol_type = unassigned DNA
tctcaagatctgagccact

SEQ ID NO: 80 - DNA, 25 bp, Zea mays
  source 1..25: mol_type = unassigned DNA
tcgaattcttcgttcatatgtcttt

SEQ ID NO: 81 - DNA, 19 bp, Zea mays
  source 1..19: mol_type = unassigned DNA
tgtaattattagccgcgag

SEQ ID NO: 82 - DNA, 25 bp, Zea mays
  source 1..25: mol_type = unassigned DNA
tgtggatgaaactgaaaccaccccg

SEQ ID NO: 83 - DNA, 19 bp, Zea mays
  source 1..19: mol_type = unassigned DNA
tacgcagtaacgtgatata

SEQ ID NO: 84 - DNA, 19 bp, Zea mays
  source 1..19: mol_type = unassigned DNA
tgccaaatgcaggtagcag

SEQ ID NO: 85 - DNA, 25 bp, Zea mays
  source 1..25: mol_type = unassigned DNA
taccactacccgacaaggtgtagct

SEQ ID NO: 86 - DNA, 19 bp, Zea mays
  source 1..19: mol_type = unassigned DNA
tgcaacaaatctatatcat

SEQ ID NO: 87 - DNA, 19 bp, Zea mays
  source 1..19: mol_type = unassigned DNA
ataaggtcccagggggaaa

SEQ ID NO: 88 - DNA, 19 bp, Zea mays
  source 1..19: mol_type = unassigned DNA
tctaataatttgcattgag

SEQ ID NO: 89 - DNA, 19 bp, Zea mays
  source 1..19: mol_type = unassigned DNA
tacaacctagtaagcctaa

SEQ ID NO: 90 - DNA, 19 bp, Zea mays
  source 1..19: mol_type = unassigned DNA
tacccactattaggcatac

SEQ ID NO: 91 - DNA, 19 bp, Zea mays
  source 1..19: mol_type = unassigned DNA
tcccccctatataatagaa

SEQ ID NO: 92 - DNA, 19 bp, Zea mays
  source 1..19: mol_type = unassigned DNA
tcatgaaagataaacagtc

SEQ ID NO: 93 - DNA, 19 bp, Zea mays
  source 1..19: mol_type = unassigned DNA
tctactaaagaggtagcac

SEQ ID NO: 94 - DNA, 19 bp, Zea mays
  source 1..19: mol_type = unassigned DNA
tgagtttgagacccacctg

SEQ ID NO: 95 - DNA, 19 bp, Zea mays
  source 1..19: mol_type = unassigned DNA
tgggagtgcatggcgaaag

SEQ ID NO: 96 - DNA, 19 bp, Zea mays
  source 1..19: mol_type = unassigned DNA
tcctatgagcaaagaagat

SEQ ID NO: 97 - DNA, 19 bp, Zea mays
  source 1..19: mol_type = unassigned DNA
tctgacttggtaaatgtca

SEQ ID NO: 98 - DNA, 19 bp, Zea mays
  source 1..19: mol_type = unassigned DNA
ttggtaaatgtcatgttag

SEQ ID NO: 99 - DNA, 19 bp, Zea mays
  source 1..19: mol_type = unassigned DNA
tcaaaactaatcagcattt

SEQ ID NO: 100 - DNA, 25 bp, Zea mays
  source 1..25: mol_type = unassigned DNA
ttcaagatttacgaattccggtgat

SEQ ID NO: 101 - DNA, 25 bp, Zea mays
  source 1..25: mol_type = unassigned DNA
ttggcgagaataacatatttaccat

SEQ ID NO: 102 - DNA, 19 bp, Zea mays
  source 1..19: mol_type = unassigned DNA
tcttgacttcggagcagaa

SEQ ID NO: 103 - DNA, 19 bp, Zea mays
  source 1..19: mol_type = unassigned DNA
tgtcatactatagctgaga

SEQ ID NO: 104 - DNA, 19 bp, Zea mays
  source 1..19: mol_type = unassigned DNA
tgaaacttattttgttagt

SEQ ID NO: 105 - DNA, 19 bp, Zea mays
  source 1..19: mol_type = unassigned DNA
tctccaaatttttaattat

SEQ ID NO: 106 - DNA, 19 bp, Zea mays
  source 1..19: mol_type = unassigned DNA
tctcatcgtacccttattt

SEQ ID NO: 107 - DNA, 19 bp, Zea mays
  source 1..19: mol_type = unassigned DNA
ttctcatcgtacccttatt

SEQ ID NO: 108 - DNA, 19 bp, Zea mays
  source 1..19: mol_type = unassigned DNA
tcgtacccttatttaatat

SEQ ID NO: 109 - DNA, 19 bp, Zea mays
  source 1..19: mol_type = unassigned DNA
tgacacaaaataatttatg

SEQ ID NO: 110 - DNA, 19 bp, Zea mays
  source 1..19: mol_type = unassigned DNA
taggtctggcttgctgtaa

SEQ ID NO: 111 - DNA, 19 bp, Zea mays
  source 1..19: mol_type = unassigned DNA
tgccaacagaacctgcaac

SEQ ID NO: 112 - DNA, 19 bp, Zea mays
  source 1..19: mol_type = unassigned DNA
tcaccacctaattattgcc

SEQ ID NO: 113 - DNA, 19 bp, Zea mays
  source 1..19: mol_type = unassigned DNA
tgcttcacttagaattcca

SEQ ID NO: 114 - DNA, 25 bp, Zea mays
  source 1..25: mol_type = unassigned DNA
tgaaccgtttgcctagtcttggcta

SEQ ID NO: 115 - DNA, 19 bp, Zea mays
  source 1..19: mol_type = unassigned DNA
taacgtaattagggctaaa

SEQ ID NO: 116 - DNA, 20 bp, Zea mays
  source 1..20: mol_type = unassigned DNA
tatgcatatacgtgtgcgtc

SEQ ID NO: 117 - DNA, 19 bp, Zea mays
  source 1..19: mol_type = unassigned DNA
tgtacatgccctgaggatg

SEQ ID NO: 118 - DNA, 19 bp, Zea mays
  source 1..19: mol_type = unassigned DNA
tagctacgatacctttgga

SEQ ID NO: 119 - DNA, 19 bp, Zea mays
  source 1..19: mol_type = unassigned DNA
tgaagatgaaaaggaaata

SEQ ID NO: 120 - DNA, 19 bp, Zea mays
  source 1..19: mol_type = unassigned DNA
tgattaagcaacaacaatg

SEQ ID NO: 121 - DNA, 19 bp, Zea mays
  source 1..19: mol_type = unassigned DNA
tcgaggactaccaaagcat

SEQ ID NO: 122 - DNA, 19 bp, Zea mays
  source 1..19: mol_type = unassigned DNA
tctaagttcaatgtgaatt

SEQ ID NO: 123 - DNA, 2928 bp, Zea mays
  source 1..2928: mol_type = unassigned DNA
tagtactgtcgtcggtgtcagttgcaatacaacccatgtgcagtgggacgagacggaaaaggtgtgtgcgcagcgcagtgctcaagttcagaactcagcgcttgacgctcgagtcagagagattcgggacgctctctcggtagacgactcggtgtcggtgctcagtacccaggtgatccgtgcatgggagtattcggtcgtctgcctgcttgcaagacgccatccacccacccaccggcggactaggcgtttggcgccacctccttgtagttgttggcttggttaattggacgagccgggtgctcgaaggcctgcctgcctcgtcatctttttgctgcgtcatgggaattgacccgcggtgagaccaatccaatccaatgatgcccgccgtgaccgacctcacgccagataccgcgcgtacggagtcagagctggcacagtcgcatgtgcattgacccgacgagaagaagataatcacagatggagcggacacaaagccacagcccacagcggcacagcacgcggctcaagtcagccgttagccggtggcggtacgtgtgtgtcagtgtgggcgggcggcggcgcggtacggccgggacaagcgtaagcgccgccgccgcctgcctgcctgcctgccgcacacgtcgcggagcatctagctagctagctgtgcgtctctgtcaggcagcgagtcggccccgctcgccgcgtcagatcggtggacgaggacgcgtggtgcgctggcgccgcgccgttcgtcgcctgcagcaaaagctactggtgtgggcagttgggcaccgcattcatctatcacgcaccaggttctcaaatggttcgagttgagatttaggggggtgtttggttttagagactaattgttagcccctccaatttattccactctagtcactaaattatcaaatatggaaactaaaatagtgttatagtttctatattttacaatttatagactaaagtgaaataaaatggagggactaaaaatgagtccctagtaaccaaacactaccttaggtggtgttacaaactgtttcacccgatgactgttaaaataaaaaaaaaatcacgcaaggaatagagtatcgtgtgattaaaagctcgagcttattttagaaggtgtgctcttatatgtttacaaatgttttgaactatatatgagtttctgctttctagattcccgagaagccacacatatctccgagggatccaattacaaacaaattcagtaaagatttctaaaaaatatcctagcgctttagtttcatttaagattgaggaataagcacacacattttctttccatagattcataatccccttcaaacaatttaaatctgttacacagatatatggctgtttttatacaagaaacattatatgtaaatgagtttaagaaacctctaactatgcttgaggacaattccctgtgtcttgctctagattacatgcgcttggtcggttgtctattgaaggaaagatgttttaatggctagacatgagagttatttgagccttggaggtagattggtgcttatcaactctagattgagtaatctaatggtttatgatatactccctccgtctcaggatataagacgtaatcactttttattcttgtcccacaatataagacgtgctctctctatgcatacgtatatcgatgcagtggtatagagacaattaaatgcatttttttggtctttgaaccagatgtggttacgccttatatactgggacggagggagtattcaataaaaaatgtaccattcaacttttgcagaattagataactagttcatttagatgccatgacatccaaatgaactagttgtctggttttgcaaaagttaaatgacatttatacaattaatcctttttgatatggcgatatgccttttaccttcgacatctattggaaagatggatagtgctagaaagcgttttttttggaagagggaaatatcatttgattagatggactaagatcactaaacctagctaagaaaaaaaagattaattacatacttgtcaccctgtttttataaaattagataggtaattcattttgatgtcattgagcgacatgaaaataaactactttataactctttaaatttggagtggcatacttctaattaaccccaaaccagatatatttacttaagcagcaggtctacggtgtcggccaatgaaaaatccaccatttttttggcatactagatggtgtggctataggttactttaaagacacacttttctcattttttttaaaaaaaacgaggaccgtgattgttcagttgaagccatgaaatataaaaactagagcctcatttttaggagatggctacgtgaagatttacagagtcagcttagaagattgcaagatatcgttctaaaaaataacgatggccagttggtaattgcgagtgagataaatctggaaatttccctaagaaactgttttgtatgggcaaagttttaatataatctaaaaaggcaaaacaaccgtggagtgaaggtcttcacgtggttggtattacaagatagaagataccctcttcgttttttttatttatcacgttttagtttaaaattaaactagcagatgataaatattcaagaacgaaggtagtacttactattctctctaaagataatctctgtacgaacagtacatgaaattatgttgctgcaggcgttatggtgttattgtttcattgcaccttatttaattgaaggctgagtttgaatcttagtcgttgactctaaggttcatactaatctaatcagtagaacacacatacttttatgttttattaaataaaatctatttatataatatatagaaatagtagcagtgtattatttcatcatgacaaggccacaaaggtgaatcaagcgcctcacgtt

SEQ ID NO: 124 - DNA, 2800 bp, Zea mays
  source 1..2800: mol_type = unassigned DNA
atttaatttgtatttacttttatgaactatattttttaatattgcttagttatatatctagatgtaattgtattttagtaaaatgtgtttcatttcaaataagagtatgtaaaaaggttgatgtagcgctaaggtgactataggctaatagtaaaggttgtgcactattactatgaacttgcggacaatgatagatatagattgagcgatagctgatgtggcggtagatatagactagtggcattagatccgatcttatattgctagagatacacataaacctcacggtcatcggtggcaaattaagttactaccagtaaaatgccaactggagaaggtactcgttgtggtgccattcttgcgccatcctcgatgtcaaagaaataatttcttgcgttgaggatttcgacatcattactacctgctcccacaccatcccatgcggttgcatctccttcatcctctcgaccactggtcgcttcatgatggtggtgccctcttcaccgcctccccatccggccatgttcccatgccgatgctggaccgctacaccacatatccatagcctccggctatccaccgcactttaagtcggacgatggagggagcgcaacaggcgggccacaccagctatttcttttggaaaaaactactttcgggttcgagccctttggtttagcttttgatttttaggggtaaaagccaaaccaaacacaccctaaatcatttacttagtttacgatacagatggcggtgagcttatcatgttattttatggtgataaacaactatgtgtgatgatgagttgctatggaatgatataaacgattagtttatttttagtaaacgacgaagtagttggatctactggagagccagaatttattcaaacctggacaaattaaaaagattaaataatataataaaaatgatcataggaagtatttattaatcacctataaatgtgttactgatatttaacacgaggtagacttatcttcgagttttttatgctctgaaaccgccatgttatgataatattatcaagtattttaaataattttcacttagtgtatcacatcatcaagtgattgaaccattcatctgaaatcttgttgtgcattcacccttaatttagtttcattatagagaaaactctttcaaccaatgctgttgaaaatgacagtaataatgtcaatttctcccccacttagtcatcggtgaatgtgaatttttatgcattaataacttaattagtaacttagttagtaatgtagttcatagcttagttattacataactagttaagtagttagtgacctcttagttaactagtcagtagtaggtaattactttgatagttagtagttagatagctacccaattaatagcggtcactaaaacgatacttccaatagctatgctgccaacaatgatatattcttaattttaggcagacaaatacaaggttcaagtgaaaaaagatgcacttacattgttcttgttaccacactcaaactcaagcaaacctccacgtgcaaggataactagatctccacaatcacgtacacaaagagagttatcaagtcgttcgttggcaaaaaccaaacacatgattataaatgtaaccgatctgcctaaacaactttgcttatacaccaaaatcaaaattatctacctagggttgcaaatttcacataacataagctaactcaacacatataaaatgaggaagagatgaaggataccttgctttgaaaggtctaaggatcaaatccaagcttccaaggttgaatcaatagattagagaaggctggaagaattggggacagggagagggagaaagatgagaaataaatgaggttcgccccggctagtgaactgatgttgattaaattagagcatgacgtcacgagctatgacattgaggtactgccacgtcagagccacaataacgttcactctatttataacataatacctcggtgctttgacctataacgccaagccatataacctcaacaccattggtcacgacgctcacagccgagtccaaatacggtatcaatcccatcaaggatgtaattgtaaaatttttttataaaagagaggtaaaatacataaaataccgagtccattattaacatgtggcaaagactctaagcagactaagttgtgtttgtgcgtttctgtaaaatgcttctgctgctaaaaggcaaacaccaaccaacaaaatgacagaagcacgagaagctaccttttcacgaagtggctgcttttgtatagtatcattttcagttgttttcaccaatcaacttaagactttttgcagcacatagctcacattacccttttgacatcttatggtgtttttttcacaactcagacttgaacaaaacatatacgctaagccgctaagggcctatttggttcctttggactaaaatttagtcgagtttgtagggactaaaagtatttagaacgcattaagtgactcgtaagaagactaaaatatctcttaacaatcttctgtcattagtgtaacagaaataaatgagtggcaaaaggtggaattaatatggtttagtccattttagtcaccctttgaggtactagagactaaagcagtttagttcatgttttagtcccaccgtttatctatttatggactaaatgagactaaaatagaaggactaatctttagtccccaaaccaaacagggcctaagttcactccttagttacaagatcagttgaccaccaagcacagaagtttctgataaagcatcaagaagtggact

SEQ ID NO: 125 - DNA, 2107 bp, Zea mays
  source 1..2107: mol_type = unassigned DNA
atcatggcgttgtctaggagacaactagtcaccgcctaggcatccagtcgtccgggaatggacatggctgttcgcctcgcctggagtaagttaggcaagcaactgggcaggtcaggcgtcgatgtggcgtctaggcatctgcctacgcaatgccgtgacttcgccgtgctgcccagcccatctggagttcaggaccatctcttatccctagttctcattccttcaaacagtgcatccactctctccctctccagccgtcccctacccacctggtagcccggccgctcctctcctccagccgccggccaacggccatccctcccctccagcagccgtcggcctctcccttcgctcccctccagcatgttgctaataacccgctgctcagtcatcggaggcagcagacacttcactgtcttatgtttcagttgtctcgcgttcagtttacagtagttcgtcagaatctgttttcagcttcagttttcagcctgttttaggcagtcccgagtctgtccgcctgatgcatgatgtgttcatgcagagcgttagttagactccgcgaatcactagcagatcgtggagtggcacgatttgatgtgcgtgtgtgagttgattaattacggattgtttggtttatagggactaatttttagtccctttattttattttagtttagtttctaaattatcaaatgtggaagctaaaataaatttgtgttgtcctttaatcttttgtctatataattagttttataattatactatattaaatactcgtaatttacatttaaacatttgatatgacatagactttaataaataaaattaaacaccctataaattagttggttgcctaactatcccctaaacgtcctcgcggggcacggtaatgaccatggacaagcatcgctgaagcaaagctccacaaatccctttagacttcaaaaaaaaatcctaaattatgtcatcacgcattctatggctgcttgaaacgataggatcacagtttaaaaatgctaggtgtatttgctgagatgcagtacaataccgcaacattgttcatgcttgaaatggtaggatcacaatgcatcggtagcctaatgccacagcattgttcataatccgagagggtggcagagaaaatatcttacgggaggatgacgggcgcccagcccacgagaacgcgacgtcccccctccgccgcggtgccacgcctggcgtcgccctcaccctcgcccagcaccactccaccagcgagagccgccgcttccctcccccagaatagcagaggcgggccatgtttagccgcggcggcgagaggggcatagtgcagggtcgatcggggctcggaggcccccgagacgcggcgggttactcatagtgattaaccggatcatagggtctgcatgagcatgttaggtgacaaaggatcactgaattccgatatgtttgttccttgaacgagatttacagtttttttagaaacatactgtgttgagctcaatagatcccaacacgcacttagggtccgtttggtacagttccagttcctgattctttagctctagatcctaatccttctaaggagctgatccttctgattcctggagaatcggaatcattttttaaaccgtttggcaagtaaaatgattcttgtctagttgacatctttagaagaattttctatttcgtcttgcatacaccaaacgtgcgttcaacaaatcaattacaagcaataatacaaattgcgggtaattttgggtaaactttgaggggaggttcatatttggttggttgaggagctgttttgagggagggtggagcagtttttttagctcccacatttctataaaaaacgactcccaatccttcctgctccacgtgagaatcagttcacaaaacacttgtttggcacggctgctctggatctccgtctaggatcaggagctggagctgtgccaaacagacccttagactgtgttgagcggttccctctaaatttctccccctatatctcactcacgtgccacgtcagcgttctctttccccctatatctccacgctctacaacggttccccctatatcaaacctctataccccaccaca

SEQ ID NO: 126 - DNA, 2502 bp, Zea mays
  source 1..2502: mol_type = unassigned DNA
tccgcgccctagggccggacggtccacgacctggcgacagggtcgccttcctcctccttgctggaatctagatctcgtcccctaggggaaaaagatcttaaggtgctctgggtcgacaggtcacccagggcgtccccagacgacgtggagtcgcctaggaattaagagatcaattcgaggaagaggtcttggatggacaactagatcttgcccctcgggaggggtgagatcctggggtcgtcttgggatcggcaggccacccaagacggatctagacgacgtagagtcgaatagggatggaggtggatatgtggaagactacaactagaactatgctacatctactcctaaggcaggaaaagtaaataaggtaattggttcgattggaatgtgttcgggggttctcaatcggccgtacccctttatatttataggggagtctggaccttttcctagagatagccaacaaactcccacgtgattagatggataaccacgcacgagataaggataaatatccgagttaatctaatcccgggacacgcggaccgtccgagcccaagggccggaccgtctgctcattttggtgcccaacaacgtccaattttcttgctctagcacccataacatgatagattcctgaggggcagaatatataatttctttatctccaagactccaaacagctaagaatcacaaatccagtttcctgccactaacggacaactcttaaagaagtttcaagctagttttcaacttaactttcagtaaaattttccaaaattcaagtagatttccatagaaatctgaaaacaacattttggtccaaatccataccgaaaatgttcttcttaatcttctacttctgatattccctaagaattagctgtatggtgtcacattctgacatgtattctatatagttaaaaaatgttccttattacaaacacaccaaagctgtaatatccctaaagttgtcatctctaggtaaaaatcaactgatttcacgtttgaattaacaacactaatttatcatgacaaggtcctggcttaatgcctttgtatggcaagggctcacctccagtaataagcaggtagtggttgctacgtgtgcaatttatcatatcgtgatacaaaagacaaaaccacatagtagcgtaacttcatcagccaacattcttttgggcttctggctgtgaaaatttagatacggtaggtttttgttccaacaatttatgggaaacaaatacaaagatcaacattaagtcgtgcagtttaccattgttaaacaggcccaaagtgattatatatgcaatacaaatttctggattcttttgcaaattctgcacaaaatatgtgcaggactatttggttgtgaactctcaagagcctcgccaaagttttggaatagccaaaaaaacaaacaacaacaacatttaagcaagagaaagtagaaaacactcgttgtttagattggccatacatgatataactggattttcgttgttagagttgccaattagtgttactgaatttgcagtgctattagtttggcttgatatagtagaagaccaaacaggatgcatcaataatctcattatgggctatggccactccaggatacctttgcatccgaccacaaaatgaacatatcgagccaacaaacgcaccacaccacagcaggtacaactcaaactaaatggacaagaggaaagcataaaccattcacctgtgtgaacagctcaatccccttccctatggacactagatccaggttgtcgtcgaagcaatacacgtgcacgcggctcccagagctgccggcgtcaaatatgacggcatacttgttcagtccgtcctcgacggcccggggtccccacctccgaccaccaacggcgaggagcacaccccctgaggcggtggccggcgcacgcggcatgagaaggcgcacgcggcatgagaaggagcacgaacgagatgaggaccaccgacgagagcaacaccatcagcacccgacggtaccggtgcacgcggtcggccaccgcctccgtttgctgctgctgccgtgctccggcacccgagtagcggcgaatcctcgcggccaccactgtggctgccgcggcatccgccgcgacatcgtcagcggggagcagatcgaccgccgagggcgtacggtagcggatgcgaccgttggtcggcgatggtttcaccgcctcctgctgcggcggctccagcgtgtcggtgcgtgcggcccggagcaagaaaatcgaatcgagggagagggcggcgcgacgggtaccttctccggcgggccgaccgtcgcacttggttcgcctctaagaccgtcttcggagtttttcgaacccgcgatgtgtgggcgaaagaagcggctgcgggggaggaatgcggcgtagcgtggccctccatttagcgtgagagagaaagaatcgggaaggaagaggaggagaaggaggacgccggtgaaggggaaggaggcgcactgta

SEQ ID NO: 127 - DNA, 2607 bp, Zea mays
  source 1..2607: mol_type = unassigned DNA
tcgcgcattgttcacgctgtcagcgccttttgcagtcgatcgttgcgcgaggtagtcgttgctccgctggtgcaccggacagtccggtgaattataacgaagcgcgtctgtgaaaaccaaaagtgggttggttggactctgtatggtcctggtgcactggacactgtccggtgacacaccggacagtccggtgcgccagatcacagcacacttggtttcttttgctcctttgaaattgatccctaacttgaatatttattggtttgtgttgaacctttatgcacctgtagaacatgtattctatagcaaactagttagtccatgtatttgtgttggacattcaaccaccaaaattaattgtaggaaaaggttaaccttatttctttttcactgatgacatattgaaaaacgacgtcattgcagatcccagatgacttgactttgaacagactagttgaagaacatgaatcctttcctatattactttgctactaccttttatagtacatgaaagaagaaaagattatatattggtttgactatagggcctggtcagctgtggtctaagtccaacaaccccaatctatcttggtcatagcgccatggctttgatcgtactatagtcctgttgcaggggcagaggtgtatctataataggggtacgttgtcatgttgtatcgttgaacactagatttcatgacgttagtcacaacgtagtaatcgatttagtaaactatactttataatacttcatcgtacactagtgtgtccatgtgtggctataggagcgatgacacagtatcggatagtggtctttagtgcgtctgctgcctaagtttacagtgtctcaggtctagaattttaggtccttttctcatagggtctgttcggttaggggtaaccgaataaagtcttagagccggttcgattattcaggaatctagtccaggaagcatttcagctggaataattatataatttgtagtataacaagttacttggaatagttactagtcttattccagtctaatcgaacggggccttaaggtgcttgagatcgaggtcattaggatggtggacctataactttgccaaagcaaatgcaatgcaaggtatatcaccaggagatgtgcctcgtataatttgaaggtacattcggtgatacgccctttctcagacgtcgacagcatgcatatctaactctgtatgcaaaaaaaaaagacatatgaacgaagaattcgatcagcacacgcatgtttaagcctgcaccagccagccagccagtggctcagatcttgagacgttgaatctatccagtcaaagctggatgatgcatatggatgggatttggtcgcagtacaccttgtcggccggaaggaaagctagctctgggacagtgaggaggggctagctgaggcctctatcgggcgaaaaggagacgagcactgcccttcgccgctgtcagcgcagcggtggagcacgatcgctttcgagatgagaatgagatagacgacgacaactgcatgcgttgatgtgccatccgactgtcactcgcggctaataattacatccatctctgcaccggccgggccgggccggggtggtttcagtttcatccacacaaacaaaccacacactgcagatccaccggcatgtgtagttgcatttcattgcatatcaaagcttgctgaagattgattgatgctggcgtggtgtagtccatgcgttgccgacagcgtgggtcgtcgacggatcggatgatctacactgcatccactccacgcctttaatttgcggctagctccacttggcgggtccttgatttggctttagaagagtcagtgcctgtctgtgctccaactagcttattcaagcacatgaaacaaatgcgcgcgcgcggcagaaatctgtacagcgcggccaggctcgatctatctgtgtggatggatgatcgagctgattagtgcgcgacgatgcttaacgagcaatccagatcgatctccagactagtgtcgtcaattcgtcatgctatattattggcaattggcattgtgcttttcaggaggagatcttgcattgtgaagctactatcaggctttgaccaaatgctgcaaattaagccagaggtcgttagtgatgaggcctgagggggtgcagtggtgtcactgtggcctgtcggggtagtacagtggtgccggtccacatgtcggccgctgccgcagtctgattactatttgtcaatggccatgcatgcgcctttgttaaaaagagagagagacatgcgcaatctgattactatttgtcaaagtttcctccacactaatttttttttacctccacaccatctctctagctcaccatgatatatacaagaattcagtcaggctgtggtatgtggagcatgcatggaaaccaaagtctcatgatgggagcgacatgattagctccaagtttagtggacaatctcccggtcaacccctggcctacactaaaaaaacagaacgccctgcatctagtctactagagaggaattggaataaatatttagcggcagattgcattccagccacacgtgagtcttttctctctctatatatattaccctgg

SEQ ID NO: 128 - DNA, 2095 bp, Zea mays
  source 1..2095: mol_type = unassigned DNA
cgtatgcgagtttctagagagtgtggctggcttcagtcgtactcgtacatggtcaacatagtttagttatcaacggtgggtgctacgtagattcacatcttgcctgaaatttatttgtttgggacttgtgagccgctagttactgcgggcttgatagacaacgctaaacttcagttgcatttcaggattttagttcgttgtagggagaatgagctcatggatattgttggtcgctcgcttgctgtgtatgacatcatgacgtccttatacgtccagttcagctctattactgtctccaatagagcgtataaaatagagtacacgaaactgtataagatactacttgatattgtttgcagcgagaaatttaaaatagaggataagatagagaatatgttgaagatagcctaagtatacgatctgaattctgataatgagatcctgatgatgggtggtaaatatagttgaatcatattacaggcttacatgtgtgctatttcaagaaagaagatgatggcatccatgtgctcatagccgcaaaagtaccctcttattttttatttatcgtattttagttaaaaaataaagtagcatacaacatatatttgagaacggagttagtttatataaattcaggctcagccacgggcacttaacaatgaaagaacttcaacaagattatttactttctactacactcaacaacaattaataaatcattatgacttctaaatatcattttacgttaaccactctgaacctcactgtggtgtctgaatacttattaaacgacagccagagccaccacctatgagaggctggaagcaacggtgccgccggagatggagacggaaaaggaggcggcagcggcgaggcaggcgaaggagtccctggagctggcgttccagatgtcccagatcctcgaaaccggcctcgaccgccacaccctgtcgctgctcatggcgctctgcgaccgcggcgccaaccccgaggccctggccgccctcgtccgcgaactctcctccactgctcccccaaccgccgccgaggctccctcccccgtgagcaacgccgccgcggggccggccccggcaacagcgtccatgttctcctccggccttcgccgtccctagggtttgtgatgtcccttttttcgccggtgagactgcttgccagttagtcgactagatcccgcagtatgcactcagccgctgtgagtgcctgaatgtagtatgttcttatgttttgactaaatttgtgcctcacaagaagataatggttcaaccaaatgccatatatcacgttactgcgtagatgtgctgctacctgcatttggcatcaagattcacattataatgtctatgtttgggttataatattaatttgcagccaggtgtttctacaaatagtcaatctaggcatgggcatatgaactgtgggttggttattctttctatgcaacatcaacggttgtggaactttctatctcttgttctctctggctctgccacccttttagctacaccttgtcgggtagtggtattgccatgatatagatttgttgcagttgctagtagattaatgggatgcttgttgcttggttgacgaatgggttagtacatcatatttccactcctaacttttttgtttgatttgtggaatggaatggattgatccaccaccacatcattccttataagctattagtataaccgcatgccactaaaattcatgggatgaacacatgatggaccacctcgcctgtgtccggtgtccccctccccccgactttagtgtccataggattttgtggcatccctttcttccccagtgagattgcttatcatcagccaaagtgtcaaactagatcccacaatatgcatttagctgctgtgaatgactgaatgtagtgtttccttctgttgattaattttgcatcttggcttatgattcacacttcacaagcagataatacatggacttgtgtagtcctagatgagttgggtcagacacaatgtgcataggttacatgactgcaaacatgtgacgcgtcctgcatttggcatcaagattcagagtataatctcttcttggg

SEQ ID NO: 129 - DNA, 3324 bp, Zea mays
  source 1..3324: mol_type = unassigned DNA
aagacaacagacaagtagataatgagcaaaacagcgaacaaaaaaatcaaaaccagtagacgaagaacctacgagaggtcatgagtatacctaataatctgatatatattgaagatgatataatctgatttagagaaggactgaagggtggcagaggcagggcattagggcgagggctctcagtttccggcgcgcgcggcgggctacagacctgcagcaaggcagtaagctaattacgtttcactaattgggctacgtgctacggacctgcgcgcgtcgggccaaggagcgctctctgctgcatcatgggtgatgggccttagcgtccactcgtcgtctcgtccaggtatatttttctttctttttccttttttagtttctacatacaacaatattattatataatatgtaaatattcactgattttgcaggatatgccggtgcatacccgacataccctatgtgtccgccactggaagcgggtactctcaaagttggacacaaattatctacaaagttcttcccaatattatatggaggcctcagggaggctcataagtcattgttgggcagaaccaatcaaggcatcatgtaagtagtttgccatcacctttccatccccgcacaatggtgaggatggcagtgacgaagatctgtaataactcggtgggattgatagtcccatcatacttcttgcaaaggttgggtgaaattctatagacatggtgcctattagaacactagggtgagcgtcatatagccagcaccggtgggatggaccacctaaccaacatggcctataggtggcgccgactccatagagttgaaaggacctagatagctagatggagtgaccgatcaataaaaatattacataaaccatacaatatcaggtagagccaacatatatgaacatggggaaacaattactttctatagttttgttctaggttatttcttttgtcaaacttggagtttgtgaaagatatgtatgaggaagacaaggtactcaataataaagggaaataatattaacactagctacagaatgagtagatgaagtaatatgaaccaacaagtaaatgtaattgcaatatagtttaaagtgcaaaccacgtgggcaagagatgaaacaataattatctgtaaggtttagattcttactagcatcctacgtccccgttgtggcgagtctaaactaggtgattcacgcactatctgacataacaaacagaacacataaagggcactacaagaatcaagctagggatacactcctacaagccattattccactatagttgatatttgtgaatctcccacaaggaatgagcacaagagtccctcgcaagaatgatcaagtcgacaacaaacaacaaagtcgctcaacgatatcatgcttccttcaagctatctaggtgacaacaaccaccaagattaacaagaatattgtagttcaatatgatcactagtgccactagatataacaactcaatgcaaattattagagatcactctcaaagtcactttggatgaaacactatcactagtggtgagtgcgagatgttttcttaggcttactaggttgtatttcaagttgggaaaccagaatatccacccccaaacctaaccaagctctatttataaggaatatatattgtgcacaagaccaccgttgtgcacatatgcacaaactcaatctaaacccttcgtttaatgatctttagttgacgtgaaaacatcttctgcactctcctcccctaacctagctacatatgtgcaaaaaaaccatgctcgatcgaagattgttagatgaagggtccagattgagtttgtgcacatgtgccgaaggtggtcttgtgcatagatatgttgccctatttataaggtcccagggggaaactagccattggacttttactatgttgattttagggttgttggacgatctaatacccaccaacggaccatgtcgctaggttccgacgactttagaacatgccacatattagctatttcaatgttactattgtcgccctgatgattgctatagtatatcgttcgacaccctctatccgagaaccatcgaaccaaagtatctagagtccgatgcccttcgtaaaaagaccagagatctactggtagtgtctgaataatatgatgtatgtttttagaccaattcataggatatgatggttgtgttcccattcaactagtatgcctaatagtgggtacattcaatgtatagtgcactcattattcgattcgatgcacatgtttttcaattgtcaaactaattcttcagggtccaatgctctactgaaaatgaattgagagcatttgtgtcatggtttttataggtaccctatacatgaggtacccactcttgctaggtcaagataagaccccaatggatgccattaagggttcatgggtggccagcccaacacgggggtaaggcctactgtatgaagtcgtggcccagcctggactcgtttcctgggctagaccgccaccaccacaagcacccataaaaggaggaatcaacaacttcagctatagatatggattcttgcgagtggaactcggacctcctcatcggacccctttgagaaaggggtacaaagggtctccacgtccatgggaagaagacactctttggctgcagcactgaacctccgggatggttcccgaccagttatatgtcatccggacctcaagccaagtggggtccggtgccgccatgtgtctggaccgatgcagttggatccaggccccctcgggcacggttcggggccctagccagagagggcctgggaatgctgtgtccccacatattcctgggcctgccccctagtccaagacagaggtctagtgccaacgagtggccaaacatgtctagcgtaagccaccggacagtgcctgatgtatgcctctgacatggggcccactagcattaggtacggatgggatgcatacttacccgcgccagcggcgtgtagcatatcccctgcattaaatacgtgcgacatgccaagcctgcaacttgcgaattttactgttacccgaatgttacctaggcaagactattgacccaatgcgccgcttaggcgcctttatttatgacttcattgctccttgtgcgttaccgaggaatgaagagacatgtggaggagacgggacaatactgtccaccctacgcacggcagagtttcagactatgccacaacctactccattagctacgcctcgaccttgattagaagggatgagaggataggatatcaggagccagcacaacgaccaagaggagatacacgctta

SEQ ID NO: 130 - DNA, 3544 bp, Zea mays
  source 1..3544: mol_type = unassigned DNA
caagtcaattttggggtcccattttacaaaaaaaaagagttttggcctcatgcttataatcagttttggtaaatcatagttatcaatctcgttcatcaattaaaatcagcgacaaagagtatatatgttctatatgaccatatatacctttgtatgcgtgatagacaatgaccttttttaatagaatcgatagagcccagcacaccagtttagttcatgaattaaaatttgataccagatgttaagaaaccctataaaaggttacgtcggctagtatcaaacatatgcctgagtcactctacctttctatataataaatttatgcccttataatgataacgagaagaaaatgagaaaaaagaataaaatatttcttgtttaccgataaggggaaaaaatagtctttgacatgtcttcattattgacggaacattcaaaagccggatcgacatcaagaaatgtttggttccagccaactaaattttagtttatcacatcaaacgtatattcgaataataattacagatattaaatgcagtctaattataaaactaactatacaaataaaaactaaaagacaagcctaatcaagccattatttaatattcataattattttaaatacttgatgtgacagttcggaacgaaacatctccttactggctaacaaataacaaccaacccaccataaaagagcatccacgcgtaaagatgcacggatcgggagcagctagcgcggggaagctttgcttggctgccgcacgcacgagttcgcaaccaatccatcgggactcagaaaatgggatctgggtcggcatatgctccagctctacgacgatccttcgtactagcaatcgtcgtcgccggtaacaaacatctccagacactagggatctgatcggaagggggaaactgtaataaaaaggatttaaaaaaacgctactggaccccttacacgactgtaccgaagttattggtcgcgtacaaaaatatcccgacaagaaagagcatcgcaatcaggcgtctgcgtgtgccgatgggtctgcagcaacgatcgggccccgcctcgtgactggccaatcaggcatcaatggtcgatcgtctaaactggggaatctcacgccttcatttcaaaggaaggccatataaaaagcaattttcctagtacgcccatttccaaattgtaacaggatttaattttagtttttattacatactatctctgagaagaatacatacttttaatatcaaattgatttataaaacaatccctatgtgcactatagatagaccgtacgtagcaaataaaagcatatccacgtgaaacacgccgaccaaaaaattacgaggagaaattcctcgcatcatctcacagcaaggatcactcgagactactttgtcgttaaattccgtagatgtcatagtacaaaccaactcggcaatcggtcgtgtgactgctcccaaaaactagatctatctcaatgtgtgctacctctttagtagagcaagattttggagacactgctctccctatcgtcatcatcatgccgatgttagaggtggaagcatcaaagggcgcgcgacatcgagagctctctcgagattggttgtttcttgtaattttagagaaaatgaactttctattatataggggggacaacctttgtgattacccattacctttcattataggactaaacttcccatgatttattgactcatacacgaatggatatttgagatttattctatgaattacttggaggaatgtgggggccaaagaccagataatttcaacaatcctccaccaaatctcgaaagcaacacttaatcggctctcaagaagtcctcaagtaccgtttggcatatcaactttatgatggagactgtttatctttcatgagctttttagagaatttccacaattcacagatcacgaccaacgtcaacccataccctgcaggacgatatctcatatataagccccaaacacattaagacaaaaaacattctaccttacagaccatagagtattacatcttcactagatagtgtaacataatgtgtactcttgttacatatacaagttttttctagagtcccaacacgttggatctcctatcataacgtttggtttgctaccgtgcgtaatccaggtgggtctcaaactcatctccttaatgcattatctatcatgtttcaagataaacctttcgtaaatggatctgctggatttttagccatgtttacataattaggaactgtcaatccagaggtcatgcaacatcgatgagtctactgagattgattatttctcgtatattttggggagaatgtcatcttattatatctaggagtatgctctcgtgattactgaaatgttttggtggttagatgctcaacacatattgttttggttgatataagctaagtgtcaagagatgcaaatggaaaaaagcaaggtatgactctagctttagtaaattgtttttggtactaacattattctactaagtgcaaagaaccttgtcaaatcgagaaaatcggattggagaagtttggctaagtccagccaaacttgcaccagctcgcggtgcaccagactgtgtctggtgcccaggctggcgctccggtgaactagccgatctcgggaaaatctgagggcgtcgcggctataattcactggactgtccggtgagccagccgcgcccacgccaacggtcggccgcgcgatcagcgggcgacacgtgggcttcgccaacggtcaccaggtcgcaccagactgtccggtatgccacgggggtcggtggctgcaacagtcaacttcgtcagaaaaggaaggaaatcacgcactattcactgtccggtgcgcccatagacaccaggcaactaaagctttccaaatagagttcaaacggatcctagctaccttggggctataaaagggactcataggcgcatggagcagtacaccaagcacccattgaacattctaagacgccaagacttcgcatacacgtatttggttcatcatgatagtgaatcgagcacttctttgagttgtgactatgatgtgatgcttttgtgtgctcgttcttgtcttgtgtgcgtgttgttgctacactctcgctcttgtgtgttttgctattccccccttactcttgtgctcattcgagatcatttgtgtaaggtgtgagagactccgaagtgtggagattcctcacaacggtatattattgagataaatagaatcatggtattcaagttgatttttggatcacttgagaggggttgagtgcaaccctcgtccattgggacgccacaacgtggagtagccaactattctacttaatcgaaccacgggataaaatcgttgtgtcaaatgtctttctgagcaagtagatccaacgggagagtgcagagagtgtttgcaaagttccacggggaatgacaatagctctgttaatctggcctctcaagggcactgtacggtggtatttataggcacccgagtgaccaccgtcctctggtaagaacgtttatg

SEQ ID NO: 131 - DNA, 2916 bp, Zea mays
  source 1..2916: mol_type = unassigned DNA
tgcctagtaattgatgccattgtgtaccaagggccacaacacatcaacactcatcacaaagaagcaaatcagtcataacacaaagacaaacaacacaagcatactacaacaaacatcgcatttctataagttccttttaattagatggtggtctttcttgaaaagggaataactactctccaaggtcgttgaaagacgaggagaagaacaagacgtatgggaaaggagcatgagcacaacaaaggatgtagttgaagcaagacttgcaaagcggcaaaggagggaacaaccatggacgggataggtaaaacaacactctcaaactgaagtgggagagagaaggctttaaaatgcaggtacaagataagcatcaatgtaaatatcaagagatgacaagggttaaaggtaatagcagataaacacacgacaaaggatgcagttgagacaaaacttgcaaggcgacaaaaggggaaagcaatcaagggatagataggtaaaacaccactctcgaactgggttggaaagaggaggctctaaagggtaagttcaaactaagcatctaggtaaatacataaatatcacaagggtcaaaggcaatgatagacaagggtgtaagagaaaagataaaggcacagaagaaccaagggtacaagtacaacaaaaaatggagttaagacaaggcttgcacatggcaaagaagaggatacaaccaagggtgagataagtaaaacaccattctcaaatcgagatgggagagaggagatttttaaatagcaggcatattgttgtcaagtactcgggaaccaggtacccaaaatagaccattcaaaaacgaccaaatccactgaccaactctgtgaggcggaccggatgaccaactctcggaccagatgaccaactctccgatgatgaccaactctccaatgatgaccgactctctagtgatgaccaactatcggatgatgaccaactttgccgaccaactctgcgagacagaccgaatgaccaactattcgatgatgaccaactctctggctatgaccaactctctgatgatgaccaactttctagtgatgaccaactccgccgaccaactctacgagacagaccgaatgaccaactcttcgatgatgaccaactctcatatgatgaccaactcttcgatgatgaccaactctctggtgatgaccaactcttcgatgatgaccaattctcggatgatgaccaactctgacgaccaactctccaccaatcagcttcggtcgaccaatcctccgtcgagcaacctagtgaggcagcgatctaagtccagcgctactgatccatgtcagctatgatgggacatcggaaggacgggataacacgctatatcgagcgtgcgcctgcacgagctggcaggtggcgaagggcccatgacgacaggagaagccatgccccatacgacaacactttgatattgattcgtggaacccattatgaagacgtcagcgatggactcgctacaagagccaaagcagcgggaaaggacgacgtcgagccaggagtacggctacgcatgaccctacgaaggacccaccacgccaacccggggagtagatctatctccctatctctttctttctctctccagtagaatacaagtcccactgtaaggttctacacttgagatacaaaaggacagggccccctccttcttcctacacaaacacaccagttgtaacacgctccacagcaatactatgattagcactacactagactagggcgcaagcctaaactaatataatcccccgtttcagatccatcgttgagtcctagcgattcaccattcagagtgagtccgcactagcatcccccaccgaaaaaaaatcttattgccccctggattccgaaaccacgacactatgctacacgaaacatacccaagaaagacataatcactatcattggtccaagcttgcactttttattaatcggcacattgactttcgccatgcactcccaagtgcgcaagtatgaaagtgatggttttcttccaacccacttctcataagaggtttttatcttctttgctcataggaattctattcagaacatgacacaaagtcatactgcctcccccaccataccttagataaaccacatgtgtctaacatgacatttaccaagtcagacaacgtacaattttcctctcagcaatcccgtttgattcagatgaataggaaagtgtcctctcatgaataatgtcatgttctgcacaaaaagcatcataactttgattcggatgaataggaaagtattcaccgccgaggaggatcctctgtggtcggacatctctcgagtcgattacctaggtgaacatgtagcatcaaaattttaaacatgtaaattttagttaaaatactaacaaagactaggaaattatcaactcaccgtccatgcttctttccaccaccaccgacatgcattgccaccggatcaattggtccatgccgccaatcgacgtcgtcgctatatggtgtcacatcatctcctacccttatttctcctacaattaagaaaacaaatttagaattggatgtttcaagactaactctaaattgtaaataactattcaatcattcagacatctgctgactgcaaaggaccttaatctatgtcgggtctgatcccctatgaccctggatgtattgtcaataggagatggatcaacaccaacttcaactttatgtatatagcaattagtaacagaaaagggaaaatatgttcttgaaacggtatttgacatatctcgctataagtcgacacatacgaatgtacctatcaccgccaaacgtatactcctaacccttattagcgaagctactcttcttcgtggacttctcttgaaattcttgagaataccataatcgacaa

SEQ ID NO: 132 - DNA, 1272 bp, Zea mays
  source 1..1272: mol_type = unassigned DNA
aagttcttaaaatcatcttgtttttggagggtgtatttttatataaaaaaagaagttaaataaaggtaattttaaaaaaaataaatcgcagtggaggcatctatggctggtctaagagcagctccatagttatgtaaattttagttctctaaatcacatatttaaagagtgctctaaatcacatattttaaataactttgagagtaaaaaaattatgggttcttcaatacaggttgtagctttattttgaatctatccatgtcaaagaaaagccacaatgtttttttaggggagttaataaatggttatcaaacgtagagagctaaatttaggaagtttatttagaaagctattggagagcaatttttagattaactatctaaattattaatttaaagagtcttttagggctactggtgttgctctgaccgtccgcaggagtactagttggtagtctcaagtctctcagctctcaaagcattttctttgctgtggttttcttttgttcttgcttgcttgtcaggtagcacggctgctgagacattactgtcagggtctcacggctcaaggagtaccaagttcaacgccggtgctgttttcttagcagtgctcatagccatagtagattcctaccacgcctacacctggcttatttctttggcatggagaattccaagaccaagagagccgcctagataggcgtaaagtgtagtggtgtactctgtctcacgtgcgctttgcatttttagagttcaaattttgtcataaaaactacatggtaaatatgttattctcgccaaatcccggtgatgagcgaagtcgaaaaaccgctcaaacatcaccggaattcgtaaatcttgaacggtttttacttcaaatttaaaaaatgaaatttgctattctcgagcggtattcgatgaagtcccaagcgtttttcttttgtgatttaccaccaaaaaatgctgattagttttgaaaaataaaataaaatatgatttataggattttttccattttttatagatattatgaaactcaaatttttaaacaaattttctgaaagtatcatcggggtctatttttgtctagtaccgctaataacaaattttactagtaactaattgttaccgtgcgggatttgaaaccatgcattggagcaggcgagcagccattggaagtgcagcccaggaagaaggaacaactccgacgacgagggatatttgtttttttagttagagaatgtgtattatggctttgttccactctagagta

SEQ ID NO: 133 - DNA, 2899 bp, Zea mays
  source 1..2899: mol_type = unassigned DNA
atgcgatctctgaaatctgtacaggaattggacagattcagttactgaatttaataaaagcataacttctaaactatcaggtttatgactatcagattttaacacaagtaaggtaataaagttatctacaactttcttgtgaccacaaataactgatttcgacaataacttaagcaaccattgcaatctctaaaatttgttcagaaattggacaggtttagttactgaacttgtgaaaagcatagcttctaaacgatcagacttatgactgtcaaatttttacacgagcaagataataaagttatgtacaacttttctatatgacgtttctacagaaaacatattttacttgactagattacactcacaaccaaaactgtacacgcaggaattttagtttgctagcacaagagcactcaactcaataatcaattaaaattatggaaagacactaccatcaatttctcaagtttaaaccattatgacttagttataaagtttcaatttatattgagatacttaagcatttcaaaaaacatgcacgcttttgttttcttctaatttttcactaactcttcttataattatgaaatgggtgttattttagcaccatatgaaactatctaatttggggttgaaatttttatgaggcataggtaatgacaaatcatgactaatgtataaattttacatgctcagattttatattttatttaatacaaaaataacaaattattaacgcaataaagcatgtgagagcaagttaaatccaaaactaattattttgtgtggatgcatgaccatattaattttttaggctaatataatatcatgcaaggacagtggaacaccatttttcacttttacttctatattatttataaaccatttaaaactacctaatatgcatcaaacaaggtaaatcactaacttaatcatacatgcaccaaaattcatgaaatttttaccggtcaccaagaatcacaccaagagcctactgtaaaaatttgaatccatttggatcaaaagagctatagatctaaaaataacaagcaaaacaattatcttttatatttttctcagctatagtatgacaacatctaactaacaaaataagtttcattaattttggatttttataattaaaaatttggagagaagaaagttcatttattttgtaaactagttttaaatacgaatttctgcagaaaatctttccactaaaacatgccaacttatagatctaatagatagataatttcataaggaagggaacaaaataagtttcacaattttaggagctaccaaactcaagatatgaattatagaagatattacgaaatctggaatttgaagcaccattacccttcgccttgggcccacacgtcagcctcacaaacaccttcttcaaccttcagccaaccaacagccaatgaacagccacsaaacgcaggggaaaaaagaaagggagggaagatccctgtgcggtcggagggggagggagaggaggaggaggccaagggtatccatttataggcgagggagcagcaaggggcggacacaaggcagccattgcagacgcaagctctgtgtattggtgggcatgggtggctgcgaggcattgcacctttccttatggacgaagcaacgaacacacagtgggcggacgttttcgtcgtttcccccttagaatcggatcaaggtactgcacaaaaatatcttccttgatgtacactctacaaatcttgtaaaaggcttgaggtgattcgggcactggttagagagttatagacccacgaaaattggtttgtcagtggctcagaaatcagtggaaacttgtgaaaactgaatgtcaaagcatgtcaaacggaatcggatgaatgccatcttttaatatgttgtgcccctattaattattaacaacttttatatttgggaaaacttgagttgttcaacaaaaatgtgggaacacgagaagtcgacccgaacgatgctgatttcaaacttagaagaattcgaattctgaaattagatttttattctgtcttgatggcactgtttgagatacttagagattgaatcaaggcttagtttaaatataaaatttgttgtataacacaggttctacaatttttattaaaggtgaaacctcatatcttgaatataaattaaagtttcactttggtcaagttagcatcattataaatcttcaaattatatttttaagacaatcggggtatttctcgacattttcatggcattttctctgcatgaacccttaataacttttgttgtagagttgatatagagttgtttgagcaagatgacaaggttttgttgaatttcaaaattcgcatttgttcggacgagcatttttcagcatgtataggatttatcttttcatgtgtgtatttggttcgaacttttagaaatctttagatacacttgatagatagagatgaatgatgatatagagaaaacaagccgatttgcataagaattaattagaggttgacacaatagagattccgctggagaatgcggattcggacatagttcgactagcaactgtagagcgtttgattaaatgagcttcagatgcgaattataagttgagaatgatttttgagtttgcgttcgcgccgataattaaaagttttaacaggctccaaaattggttgtttctcacgatcgaataactccgaattcggtgaaatgtgaatgaatagtctggataatcagagacatacgcgagcgagaaatagaaatgttcactgagcatccgagattaggataaatatctcgacgtaacacgaactagacacctagggtgtcacacaaccctacctgaaagatgggcaagagggggcggcaatggtttggtggcagttcatgttaa

SEQ ID NO: 134 - DNA, 2534 bp, Zea mays
  source 1..2534: mol_type = unassigned DNA
gtccattatttatattggtgtaatccaatcaactagacatcaaaacgaaacattttttttcccggatctgtatcatctaatgggtcggaccagtgaagcgctttttaaactgattgatgtttatactcaggcacttataagtaatttcatctaatattcatctattttaaggcattccatattacttaactcattgcatattgcttaagtcattttatctgttatcaactattttatcttattcaatcctttaattagttttttttaactaattttaagtcatttcatgtattttcagacacttaaccttactcggtgcttgttaatatcctttagttttcagctatttttgaagtcattccatgtgttttcaaatattttatattacttcatgtttgttaattgattgatgtttatacttagtcacttttaagtaattccatatgatattcagctattttaagccatttcatattattttaggtaattccttattatttaagttattttatctaattttcagctatttcatcatatttagccctttaattagttttccaactagcttgtaataatatcgtaaaagttatacatcggggataaccttttcataacggtgttgaacaccaaaagtgatggacggtctggctcaagggcccggacggtacgcgcccccacgatcagattaactcggatgattatccttatctgatgtgtggttatctatctaatcacgtggggtttgttagctatcgcctaggaacgggtccagacctccctatatatatgaacgggtacgaccgattgaaaccctcgaatacattgcaatcgaatcaattactttctttattatgtctgccttagaagtagatgtagcatagtctagttataactttccgcatatccacctcaacccctattcaactatacatcgtctagatccatcttggatgacctgctgacctcaaggcgactctaggatcttacccctcccggggggcaagatttattcatcgaattgatctcttaatttctataggactcgccgactctacgacgtctgaggatgccccaggtctagattccagcgaggaggaagacgaccctgcgccatcgtgaaacgttcgaccttgtgtgtggaccgtccggtgcgacacaagaaaggggtcgcttctgcgcccaggtcgtggaccatccggcgcgctgccgtagaggcactgtcagatggtacacctctagcgattggcgatgtgcagatcaactctaacaaaaagattttattttttaattaactctctgcaattctatagtaaatagattgtacatgtcattagagcaaccaataatatatatttgtggaattttgtagcttgcctggcactagtccatttatttatgtagttgttactttgcctctactctagcattacttcctatggttccttagtcgtcctgctgttatttccccagtgtatctggaaggaggttgccgacgtgattgaaggcatttttggatgtccttgcccttgcatgcagccgacgtgagaattgaatcgaagttatggtaaggttgcatgaatcaactccttttagcaccgcatgttgtcttaaataacaatgtcacatcagcctaaaactagataacaatatgtatagagttttaactcatgtaactctattatctcttatgaaactctctctatatcttttctcataattgcatttccatatcaccaagcatgatgatatgccaccgcatttaatgagtataaaactctcgtttagaatgtccttatatgagtgttggtaaacagtattgagaagaactatgaaacatattaaataagggtacgatgagaaattagcatccaccttggtatattaaatactgtccaaaacgactactaaaaggaattggcgggagtacttgctcttaaaacaatgctcgcggtgcccttggctactcacascggtttaaaacttattactcacagcaacggttgtctctaaagaacactttaaatttagggtctagctccaacaagaacctaggtcttgtaccctaaatttagaggatgatgttgtcctctactccctacaacagcgtactttaaacgattctctaaatttaaagaacgttgctggatcttctatatatagagtttctctaaacggtcctctattcatttgaatactytaaatttcgtcccctaaagaatattctctgtctttacataccgctctaaaagattttgtcatctatatcttgactctatccaacgacatcctctatattaaataatcaattaaaatcgctatgtcaacgtctcttccaagtgggtcccttaattgtccagagcctgcgaagagctatagaggagcctccaaatgtagaggtcgtggcaagactccgctattttacaggtccgtttagcgttctctgttggaggcaaaaaaaaaaagggtgcaagtgaaacgctatatttaaggtacatgaccatttacaggttgttgcttgacttctatcctaaacc

SEQ ID NO: 135 - DNA, 3034 bp, Zea mays
  source 1..3034: mol_type = unassigned DNA
tctcgtgcgttgcgaaggcttacaacaatacccacgtaaactatccaccaaatttttttattgattgtctccgctcttcgtataatattttttgatttggctaactgatattactatttattccatgcaatatgtcttggtacaacacgaccaatgaagtgagcgattagaagacagttcacaacgactgactgaacaaatagagattataaaatgacataattccaccatacaacgaccaaataagagaaagtttgtgagctcaagtttctaaaataagtcacgtgaactcaaacttataaaaaaaatagatcgaaatatggagtgattcctaaagtcaggcataaataaaaaytgratgcgctccatataaattatgctacttcayagcaattactaacgtttaaaaccaacaaataacctttcattttactgttagtgtgacaaatcattgttgctccatccarttcagcaacctcaaasaccatgtagtccattgcgccaatgtggtctcagaaacgacctaatgcttgcaagagccaakaacgtcgtgtcgygcttggctgtagcctcggcccgtagtgctggccyrrcccgacacgattatattttttttattttacaaaaaaacktatatacatatatataatttatattcaatattaaaaayatctkagtatgatgttytactggttagayagcttcaycyagtststcccgcccttcttccatcagggcatrggttcgaaccccacctcctkcaccgttttttaacattttacgctgatttaatcaaatgggccgacgrgctaacggkctggcccgacacagtcagcaggccggcatgacgtgcctgdgcyakagttgtggcccrcgkgcgtytgcgttggawggamcsttggamgcaggaggcattgacttggcgatcggwtaagtagatttcgtgcagtcaactgaactgaaccgcatctgtctactctgagtacgtttggatgaagatactagagaggttaaaattgaattagatctaaagaggatgaaagtggatatctgaatggttaaaagaaatttaatattttaaaatgtgtatgtattaaatttggtaatgaatttttcttatgttataagtacattattacaaactatgaatagaattttgcataaattattttgtgtcatttgctccctacaaccaaaaaggtaaaaaatattggtatttgtatctgattctgtatatatctattatttgagaagatatatgataaaattgaggtttttttatgaatctttacaagctcaatgttaaaaataagattacgaatttgtattacagattttatattctaatgttcgcaatcaaaaaaattggtaatcaaaaaattggtatccgaataagtatcaattttcatccctaattagatccattagcaaatctatctagtattgaaaatgagttgcaatataaatctattgttcggatgtaacaaagggagggtcggtccaccttccacttatgacctacaacccctaggtctgtggcacactcatgacctatcgagcctaggcctgagtgcactggtcgcctacaggacccgcaacacgacaagttgtgtcgagacccaagctatgcagaccaggggtcgatatgacataaaagtggcaatgatggtgtcagagctccttgccacccacaccgcccgtcataaagagcgcgaccaagaaagcccaggcgaccgagacacatacgaaaaaacacgactttaccaaggtagaacgtctcattttaccatggcacaatagctccttccttgagaagctatgtaagcttctgcttccccttagacctataaaaagggaggaggtcagccagaacacagatacgaacacatgcatacaaacacgtcgaccacaagacgagaagatcccgaaggagtcaaggagcgaaccaccatgacgcccaaggctgagtagagagcactagtcctgtagtctttaggtctagccacacataagagacttgggagctcctctctctctcacacacccgcttgtaacccctactacgagcattgagcaacaaggtgtcgatagcgcgagccaacaaagactggatgtagagacgttcagcccaaaccagtataaatcttacgcccactgagcacaccatctggactgcagcatgccgatgtctgccacaaagaactgcatgtaattgatgtagaagtggtcttaagtgccacatgtgatgagcaaggtgatgtgccccaaaggaaatgtgaacatccctaagataatgccatagaagggcactaaacttgggttaggcaggatacaarccgaaccctaacctgatgaccgaatagataggatttgtggatcgaacctgaaaccggaaaaccgaaaaccgaccatttcggtctattcgggttcgggttcggttaacgggttcaaaatgcccagccctagcagcaatcctggccaaagcgaacatgcttcagtggaccaccagtttttattccagagccagatccatccctgaccagttttgagtaaatgagccggatccaccctatttggcccaggaactaaaacgtgcctgtcttcaataccgaacaaacgaacggggcctgaagcgaaagcaatccttggtcttatggtgggtatttggatgataaatgcagtgtccctccataatcttctgaaactcatcttggttacaggagaaagatcattactgaccctcctgcttgactatcgtcgtgaattgatgatccatcttactccctttaggtccaaattatgaggcattttggacaaagtttgagtcaaacttgaaaactttgactataaataactattttgttatttagttttgaaacctaaaaaatactttcacaaaagtataaatgtattaagagttcatttgtaatttacaaaaaatattggtcaaatctatattttggagacygtatcgttgtcttaaacracttataatttagacctcgagagagtatgtttcttgtgtctgccttta

SEQ ID NO: 136 - DNA, 2979 bp, Zea mays
  source 1..2979: mol_type = unassigned DNA
tatgcaaggtgaataggtgattgtaccattgtgacaggggcagctaagaagaccaaatgaaccattaaagagtccaagtttcagtttattgggtaatataggaaacaacatgtctgaaacaacaactttcagtttgtaccagactcagaggagagaatgtctgaatgccatacttttctatgcatggatacctgcacacaaatattctcactttttacatctagtagtgcacataaattcccatacttaaaaaacaatgagattatcaagcaatgtcatgcaactacctgaatctaataaaatgacattcagaaagggattttgcaacctcaccttcaaggaaacttacacctttatacatacgcttatagttctgtgttgattttggcagaatatcaagtgaaaaaaacaacagcgacaaagatcagataagtcttccactaataagcatttattatagacaaactgagaagctggtaataatgtgattatggaagttgttttcaaacaatagtatagtttgttaaatcggagtaaaatgctaactcaacaacttgatgcaaagacatgaaccattgtaagtatataacagtaatgacctgcaatttctggatgaatatcttattttagcttacctatgagatcaatgggaagtccttgggcacctctctgcgacattgcccttacaacaaccttcttgcaatttgaagtaaccagtggtcgtgctgatgtggctttagaagagatggcacaattagttctggaatagattgctcttccaaatgtatgtcgacccaagcatttgcttgcaggctgggatgcaagggcgtgttgccatcatctacataccggtcgtcgcatatgctctcatcttcctttatgtacaaaaaggagtaggactgcaaaaaatgttttggaaataatatcatggactacacttaaggacatataatgatgtgtattgttttaaggtcaggatgtgtatttattgattgaaaagttttcactgctacagtcaagttcaggtaaacaccatgaatccaaaactaacccaaggttattcacaatctcaatgagacaatgacaacttcaacctggggaatacatattacagcaagccagacctatgtgctattttaattactacatttgtttccttaaatgaaaggtcaacattttcaatagctttggataatgcaataaaaacaatgcccctcgtgaagttactgtcacctaggagaaatagtacagttattagaaggacctaaaaacatggcttgtaaagttaattctaatatacatattcgtataatatagcctaacctttattatcaatatttatccaactataaaggtaatttcaaaaacatggatagaacaaataaaagcctcgaaacttatgctaatgttgtccttagatgggtcactgggtcagaacttttagcagtatgttttgtatggtgcagtgagatgagaaagctccaactaaagtcgcttgactcaatatccatcatggaagccattccaagcctctcccaaaggattcctcctcgcacttggtcacaagggtcaaggtcaatgaacatgtgttgcaggttcttgaatgttctaagtacaaataaacatgtgttgcaggttctgttggcaataattaggtggtgactatcttgtttacctggaattctaagtgaagcatgattctaccttaacaactaagatctcaatctatcttaatctgtccaacccaaccctaaaaaaaaggaatcacatttcagaaaggattgacgagttacaaagcacaatgcaggtccataacctttggttatttccaaaacaaagtcttgcatatatggctagaacagtaatatggaacaacaaaaaagtaagggtgtgaacagagcatggtgccaaagaaatgaggcaatgttgtaatatcaaacagaacaaaaaatatacttaaatgaacaaatatggtacgtgaaaatttagttaagaataatcatataattatatgtagaattattacggttactcaggatgacttcgaaagtatggggatttccaacatgttcgattgtgttgttggtcgctggcccataataactccatcgaaagcttactaaagaattcttatgcatacacatgaaactcaagaatcgtgttatgaccaaaaggttcaggcctgacaactgaaggttcaaaagcaagggcacaaaaattgtgaaaagacaacatgatccttccacatcctaagataagcaaaaaaacatctctacttgggtaattgatttttcagtcggctaaaagtaayagttcgattttgccaacaagatcagctctatgcttgtagagtggaacctgcacagcaacaagtgtccaatgatccgagaataagaattatatgcggtggcatgacatatttatcaaatcatgatgattttagaagaaaagcaacaactcttttttagaagcaccagctttacaagctatagttgacacagccagcatagcatttccaccaagctcagcctgcatttcgcataatatcatatctatttcatttggttaaaatatatttgcctgaaataaaggaacaacaccaagatagaaaaaagtttaggtagtaccggtaagtggaaacacaaattcagtgaaaagaacataattatttccacatagtcaaataaaactgaaataatcagtatcccattgcccctatattgactatacccaytgtaaataattgcttgagcatattgagtcatcaattgtttgtgtacaacatgggtttgacaggaacaaaaagctacaggggagagaaaaaggaaaaggatctccgagtgttccaccttgtggcgtgtcttttccaagcccatgatggcctggtcgatctatgcatgttgttgtgaatccatcccagcgagcacctttgacaccttgtcattgctcacctgcaccgcgtcaatgaataccctgcaa

SEQ ID NO: 137 - DNA, 1084 bp, Zea mays
  source 1..1084: mol_type = unassigned DNA
aattttgaaccctactactgtcacgtcagctaggactaggacatgcataaaaccaacagccatatctagctaaccgttttgacaagtactgaaatgtgcttgcgtgcgcgcttctttacttagacagagaggctaccacagccactttcatttcgagaccccgtaccgccatcactcgacgcgatgtgttttaaatttgcgtaaaatcttgttttatccacacaaaaaaaaatcataccatggcgcacatgtgtgggtccgcgtctgaatttaatgtgctgccacgtacgataagacaggggttgttcttcgccaagtgcatctgaggaaggaactaatcaatatatatagtctcgaaagccctcttgatggcagtataaattgagtgattattagccaagactaggcaaacggttcacatgaaggcctagtggagctttattacattgtgtacctatatgtgtgtttttgccataagctgcacgataggtattgggaaattggtaaggttgctcaattatggcgtactacaagctttagccctaattacgttattgtccttgtccacacgccgacgcacacgtatatgcatatctatctatggcaatcgacggcgtatattgttcctgtcagtgtctagtcggtggcttttgtatccctgccaagtgccatccaatgactttgtgtttgcctgctttcagcttgttggtcgatctggggtttgcggagtggcagtaagacacaatcctttcgtggtgggagactttggatgacttgttgcatcagaaattcgtccccatgttttccttgtgcctttctgttttcccaagtagaggtggtagttcgatgtgttccaattgcactattttttcttggaacgtgaggggtttaaatgaccttgctaaacgtaaaagcgtgagacgaacaatcctctctcctctatatgacaagggcgtctctgcctctctggggctgtgcgtgctatgcgaccgcacaaggtcccccaaatttgcagggctctaattttagtagaggtccatatatatattaaatgaaaaaaatatttcatgtatttttaggccaa

SEQ ID NO: 138 - DNA, 3890 bp, Zea mays
  source 1..3890: mol_type = unassigned DNA
tttaggtgaactatagaatactcaagctatgcatcaagcttggtaccgagctcggatccactagtaacggccgccagtgtgctggaattcgcccttaagacaacgagagagaggaataaggttgggagagtatatatagttgttgggggtagggttttagtttgcgggattcaccaatttgccctttgacgggccgtttgggcctcggccctgtagtgcggtggcaacaggcctacgttctaaattttggcccgcccttcaccggccatcgacgagttcttttttttttaataacccttttctctcctccctttgagaatacggataggatcataggagcactgtatttattggtctatgtgaaaaataaccatcaatctataatggactgcagtctaacatagaaagttagatgtgtgatagacaatgtcacacaagtttgatgtatcgtagcaaaaatattaccttacatcttatttactaatgtcacacaagtttgatgtatcgcataatttttcttacatttgatgaagtgatgaacacatatcaagtgtaatgttatattttgtgtaattgtatggtcaaacaatacatttatttgattgcataggatatctattgttagttgcaggtatattcgatggctcgcacacttagttgattgtgtttctggtgattttttactgattattatttcgatgatattatcatgctagtttagagccatgatatggagtaggcataggcactgttctcgaaaaacatgatttgttcatgtaacctttggcagagctccactccatgattctctagctccgatagtcgattctctaacagagtgataccgagtgattctctaacacaaatgaatttatttgacaaaatcgtttgacaaataggctctgaagtgattcctgataagttagagagtggggagcagggtttctttatctcactctttataaaacactagttgattgaccgtacgttgtgacggctcacaacaatactcacgtaaaatatccaccaaaaatatatcaagatttttattgattgtctccgcataatatttttttatttgactaactgatgttgttgtttactccatccaatataacaacacgaccaatgaaaggagcgattagaagagagttcacaacgattgactaaacggatagatattatataatggcataattccaccatacagagacaaaataagagggtttgtgatctcaagtttctaaaataagtcacatgaactcaaacttataaaaaagatagatcaaaatatagagtggttgctaaagttatgcatcaataaaaactgaatgcgttccatacaaattatggtacttcgtaccaattattaacctttccatttacttttagcgtgacaaatcattgctgcttcatccaattcagcaacttcaaacatcatggagtccattgcaccaatgtggtctcagaaacggcttaatgcatgcaagagccaagaacacaagggacgaacaccctatggtaatgctcgtatggatcaccgaatcctaacacatattttacaggatccatgaaccatcatcagaagaacacaaaccatgtgcagaaaataaataaagtattatcacacccaaattatgttaagtccttagcacaacaaaaaaaactaacacttaaaacaacagaggaacaatataataatttctgcaatgacaaaaggatgtgtgacagatacatagaagcggtacaaataccgagtcgacaccatggtaagggaaaagccatgtagacacgcgatgccgagccatcgaacgagtaccataggcagcaaatcagggacccccatctctcgcctccaccactttcaaggtttcgtagagcaggaagagaacggaagagttgggcatacctgttcgttgtcgaagaaggacacgacgaaggtctgggcatctagagacgacatagctagtatgtcgctagatacatatagggagagagcacgtaaacacagaaagtagcatagccaaagcagctccagaccaagaggcacccacatcagacgtcagtccgagaaggaaaccctagcatataaagttagatatgtgatagctaatgtcacacaagtttgatgtatcacattaaaattttcttacattttatgaagacatatcttgtgtaatgatatatttttgtgtaatcgtgtggtcaaacaatacatgtgattgcatatgatatctattgttagttgcaggtatattcgatggctcgcacacttagttgattgtgttttggtgattttttactgattattctttcgatgatattatcatgctagtttagagccatgatatggagtaggcataggcactattctcgaaaaacatgatctgttcatgtaaccttggttccgcttgtttaaagctaaataaatgacataggcaagcatcctcagggcatgtacaatgtagataccacgacacggttctcaaagtagaagatataattaagacatagttaagtacaaaggagtgtgtctaaagccttgtatcttaattaatactgcatactctttgaattaaatgatgattgatccattgtgtatatgtactatatatacacatatatgttgcatacttgacaaattttgcaatataaaatatacatatatggttgatttaacgtggaccgtaccgttgccatatatgttcaactaaatcatttttgagctcgatgtgctttgagcgatccctaatctctgcatttggtccaaatacatatgcaaaacacggattaacttgattgctcacttcgagtgataaggcgatagatgctccaggattctcattcaaatccaaaggtatcgtagctatttccttttcatcttcaactatcatgtaggatattactcaaatgaaaaggcagagaacctgtaggattgcttaaaagatatagtagtattttgcttagatggcaaacatgtctattcacgatacgaaattcattgttgttgcttaatcaattgcaagaacagatctacgacttaagtaattggaagaatagatatatgggatcaaagaaattagcaaagaatagattattgtgggataagaacagacctgcgggattagttgcaagcacagacctacaggatcaaaggaacttggctgaatctaaggccttgttcgtttccgtcggattgtacccggaattgttccagctaatcaaagtttatataaattagagaagcaatccggtcaggaatcgttccgacccaccaatccggtagaaacgaacaaggcctaagggatttttgcaggacgttacctttcaagcagatccatgaatgtgtagcttgccgaggatgatacacgtgctgggcggcgaatggacggtggacgccgtcggtgaaggacccctgcgcgccgacgggggaggaggttcgagagggttgttgttgccaacagtaaggggaggacatctagaaggaggtaagagaggggtagcggcggtcggatggagaaccggaaagggtggtggtggtggcggctgggtggtgaaggggagtacctgtttctttccgattcatggcaaaaacaaatcgacgggactagtgatgaaaaagtgaccgcaaaacagatgaacgggagcactggatgccaaaaagaccaccgacgttcatacaacgcaacgacatcgtagcttcgccacgagccatgcgcgaggaacggtgcattcgtcaaggatcgagtcttcgaaaattttacacgatatattaaacagcgtagggccggaccacataagggcgaattccagcacactggcggccgttactagtggatccgagctcggtaccaagcttgatgcatagcttgagtattctataggtcacc

SEQ ID NO: 139 - DNA, 3192 bp, Zea mays
  misc_difference 662: note = n is a, c, g, or t
  misc_difference 2150: note = n is a, c, g, or t
  source 1..3192: mol_type = unassigned DNA
aagtctgcccaagtctttaggtctactcaccgttggccaattaaccaggcagtggcctccacttgcattgtctccccctttccaaaggaaggaccgacgaatcttatcgatttgcttcctggcccattttgcaagggggaagatggacatgtgataggtcggcatggaggagagcaccgaggtgactagggtgagacgtcctgcccggttgaggagttgtcctttccagcccgttagccgttgtccaatcttttccactaggggttgaatatgaattttttggagaggcctagtatgcagttgaaggccaaggtagcggcaagggaacgatttgcagctacccgggaagggttggagaatgttcgtcaagtccatgttcgcacaattaatcgggtgaaccgagctcttctcaaagttaatgaccagacccgtggcagaaccgagctcttctcaaagaatttgcttgacataatcagggctcacaaacatcgcagcatgtgttacaccattggtatgtaaatagctcagatttgcaaacataggttggaatggttagacatgtgttacaagaaataaaaaatcaatgagacattgagagcgacagatttaagactcttactcattaatgcaatcacgtgatgataaaagggatttacaagctntgagcattcagattacgacatgtgcattaaacatacacgaattctaaacaaattgaattgtaaatggcaatcttagcaggactatttctaaacaaactaaattataaacatcgttaagaagtataacatgggttacaagaaagaaaagatgcataaacttgtcctggttagaggataaaaagcaagaacaatacaccgaaacctgtaaaatttacatcatacaattttcaaaccccctaccttcccaataataagatgctttggtagtcctcgaaacatacaattcacattgaacttagacaaaaaaaaatatctaatttataatggagggagtacatggctacacatggataatgtgataacggaaattgtatctgatggctgttgagcatgtttattacagctgaatttttgaactacagtcaacaatggcagttaggtagactgaacaagttcctaagtaaatctagcatgggaccaaataagtagatgatacaaattgattgtaacatactaataacaagcagtggtcaaagtggacctaaacaatcaattccctgtatattagagaagcttacttttatttggtatctgcactgctatcattgccatcatggtgcaaatacattatgtgcagtaccaatacaaatagacataaaataatttaaattgtgttaattaaaattcatagcttgcattgccattgccgtgatttaggctcttatatgttgaatacaaggtcctctttttcagtcacaggatattttgtctgtagtttcaatgatctattgttcctttagttgtaatatgcaggttaggcttaatgcaaaaaactcttgctgctgatgcttcacatgtttcctctgcaatatattatgttggtgtaaatacattatgtgcagtaccaatacaaatagacataatataactaaaattcatagcttgcattgtcattgttgtgatttaggctcttctgttgatggctttcagataattgggcaacggtgtgtgtatatgttcagattcagaaagtgaggacaatatagcgtttgcagcagtggtaagttcattcttaatacccacaagcgaatacccatttgtagcagtgttaaccatttagctcgaccgaaaagcaatcaacaaggcttgcttgcgaattggcacattgtaattaacattttgcatcattccttcgtcaaaaaagaatgtgagccgtagtggttcgatccctaaggcggcacatttttttgcttttcctccaggtcgtcgccctgtgcagggagggcctgctgatcagagatcaagagggaaagcagaagacacgttgtgccgggaggaaacacacgacgaagtagagacttagaagcaataagctaaatattttgacaactttaattcgagcaggtgtctcaaacaactggttaattcgttttgtgaccaaaagaggaaaaagggccatctaatagttctgtaaaacaagcacttgcntaatctccccctcaactcgccaacatgtgtgtgccttctgcgcttgctatttgcttgggtgcccctcctatgtggttgcacctgcaccctcctgtccatctcctcctcctgctcgtttttttttttgagtttttggaagctaccctcctatctctttccttaaaaccgcaacacctttccctccgcgcccgcacttcacggctgccaagaagtcttcaacgcccgacgcgtggccgcacagggcgaggtctcgctcgatggccaggcttggccttcgtgccaccacccacccacgcttcctcaccaccgtggagatggatgtgtcgctgctgtggtggccctagcttctgcgtgggcccacgtgtagatgccgctggagaagatttaaagggcgaattctgcagatatccatcacactggcggccgctcgagcatgcatctagagggcccaattcgccctatagtgagtcgtattacaattcactggccgtcgttttacaacgtcgtgactgggaaaaccctggcgttacccaacttaatcgccttgcagcacatccccctttcgccagctggcgtaatagcgaagaggcccgcaccgatcgcccttcccaacagttgcgcagcctatacgtacggcagtttaaggtttacacctataaaagagagagccgttatcgtctgtttgtggatgtacagagtgatattattgacacgccggggcgacggatggtgatccccctggccagtgcacgtctgctgtcagataaagtctcccgtgaactttacccggtggtgcatatcggggatgaaagctggcgcatgatgaccaccgatatggccagtgtgccggtctccgttatcggggaagaagtggctgatctcagccaccgcgaaaatgacatcaaaacgccattaaccgatgttctggggaatataaatgtcaagcaatgagattatcaaaaaggatcttccacctatatccttttcacgtataaagtcagtccgcacaaacggtgttgacccccggatgaattgtccgcta

SEQ ID NO: 140 - DNA, 4300 bp, Zea mays
  source 1..4300: mol_type = unassigned DNA
tgttgcggcctcataaaaggaggagtaggccatatctatcctccacaccatactctagtctctagtggagtggtgtgcgtacgtacagtacatcctccaactagccagtcccgtagccatgtgagctttgtcgtcgtggcgcgaagcaaagcagcacccagcaggcagccgccaaacgagagtcacacgcacagctcgcggcacttaacagtgcgcgagaggacctgccgacgccaaacaagagtcgatctgacagtggcctgtgggtggatgtggacagacagacagaccaaggcggttcggcgtcttggaacccgcgccgcgaacacgtacgttacagacggaagcatgctccggtccggccgtccgggtccgggtccgggtccagcggtgatgttgagacagcgagtgcgaggaagaagaaacggtccggaactgcggctgggctcgtttgttctgcccccccccccacccccaggggtcgccgctctggacggaacagcggcacatggatggcgcccgccaagtttccatgcggttgttgttgttcacacgccgtcgtgatcgactcgtcgcttagtactgtcgtcggtgtcagttgcaatacaacccatgtgcagtgggacgagacggaaaaggtgtgtgcgcagcgcagtgctcaagttcagaactcagcgcttgacgctcgagtcagagagattcgggacgctctctcggtagacgactcggtgtcggtgctcagtacccaggtgatccgtgcatgggagtattcggtcgtctgcctgcttgcaagacgccatccacccacccaccggcggactaggcgtttggcgccacctccttgtagttgttggcttggttaattggacgagccgggtgctcgaaggcctgcctgcctcgtcatctttttgctgcgtcatgggaattgacccgcggtgagaccaatccaatccaatgatgcccgccgtgaccgacctcacgccagataccgcgcgtacggagtcagagctggcacagtcgcatgtgcattgacccgacgagaagaagataatcacagatggagcggacacaaagccacagcccacagcggcacagcacgcggctcaagtcagccgttagccggtggcggtacgtgtgtgtcagtgtgggcgggcggcggcgcggtacggccgggacaagcgtaagcgccgccgccgcctgcctgcctgcctgccgcacacgtcgcggagcatctagctagctagctgtgcgtctctgtcaggcagcgagtcggccccgctcgccgcgtcagatcggtggacgaggacgcgtggtgcgctggcgccgcgccgttcgtcgcctgcagcaaaagctactggtgtgggcagttgggcaccgcattcatctatcacgcaccaggttctcaaatggttcgagttgagatttaggggggtgtttggttttagagactaattgttagcccctccaatttattccactctagtcactaaattatcaaatatggaaactaaaatagtgttatagtttctatattttacaatttatagactaaagtgaaataaaatggagggactaaaaatgagtccctagtaaccaaacactaccttaggtggtgttacaaactgtttcacccgatgactgttaaaataaaaaaaaaatcacgcaaggaatagagtatcgtgtgattaaaagctcgagcttattttagaaggtgtgctcttatatgtttacaaatgttttgaactatatatgagtttctgctttctagattcccgagaagccacacatatctccgagggatccaattacaaacaaattcagtaaagatttctaaaaaatatcctagcgctttagtttcatttaagattgaggaataagcacacacattttctttccatagattcataatccccttcaaacaatttaaatctgttacacagatatatggctgtttttatacaagaaacattatatgtaaatgagtttaagaaacctctaactatgcttgaggacaattccctgtgtcttgctctagattacatgcgcttggtcggttgtctattgaaggaaagatgttttaatggctagacatgagagttatttgagccttggaggtagattggtgcttatcaactctagattgagtaatctaatggtttatgatatactccctccgtctcaggatataagacgtaatcactttttattcttgtcccacaatataagacgtgctctctctatgcatacgtatatcgatgcagtggtatagagacaattaaatgcatttttttggtctttgaaccagatgtggttacgccttatatactgggacggagggagtattcaataaaaaatgtaccattcaacttttgcagaattagataactagttcatttagatgccatgacatccaaatgaactagttgtctggttttgcaaaagttaaatgacatttatacaattaatcctttttgatatggcgatatgccttttaccttcgacatctattggaaagatggatagtgctagaaagcgttttttttggaagagggaaatatcatttgattagatggactaagatcactaaacctagctaagaaaaaaaagattaattacatacttgtcaccctgtttttataaaattagataggtaattcattttgatgtcattgagcgacatgaaaataaactactttataactctttaaatttggagtggcatacttctaattaaccccaaaccagatatatttacttaagcagcaggtctacggtgtcggccaatgaaaaatccaccatttttttggcatactagatggtgtggctataggttactttaaagacacacttttctcattttttttaaaaaaaacgaggaccgtgattgttcagttgaagccatgaaatataaaaactagagcctcatttttaggagatggctacgtgaagatttacagagtcagcttagaagattgcaagatatcgttctaaaaaataacgatggccagttggtaattgcgagtgagataaatctggaaatttccctaagaaactgttttgtatgggcaaagttttaatataatctaaaaaggcaaaacaaccgtggagtgaaggtcttcacgtggttggtattacaagatagaagataccctcttcgttttttttatttatcacgttttagtttaaaattaaactagcagatgataaatattcaagaacgaaggtagtacttactattctctctaaagataatctctgtacgaacagtacatgaaattatgttgctgcaggcgttatggtgttattgtttcattgcaccttatttaattgaaggctgagtttgaatcttagtcgttgactctaaggttcatactaatctaatcagtagaacacacatacttttatgttttattaaataaaatctatttatataatatatagaaatagtagcagtgtattatttcatcatgacaaggccacaaaggtgaatcaagcgcctcacgtttttttaaggaatcagcaagcgcctgtgtggtaggttgcagcaagcggctgagccaaagcgggtcatgaatcactgggccgcttgtgctcggctcctctcggctttgtttcgtgggccagaagaccggaccacgggccgacagaagtgtcgcggtaccggccaggcggccagtttcgttccgtttcgtacttcggccgtggatcacgttcacctggttctgtggtcaacttctcgggtaggcatccgagtgaccgcgtcccctggagttcagctcacacggtcacacctcacaccactcaccctgatctgtggccccaaccggaaactgtcacgatcgacgcgacgcgactcgcgccgagtcggtaccacgcatcgtattcgtagagggaaaaaaaaatcaactaggagtaggagggaagccccttccctaccatgacgtctggccactgacgtgcggggtagactcagactgaccccgcacgtcagtgccccatatccctgtccatgcagctgcgccaggcggcaaaccaaccagctctcgtgcgcagaaaatcccgcgccgttccccacgcgtcaccgtggtgcgccgcccccttcctctcccgctcccctccacctcgactaccaaaacactgatccggtcgctgattcgctggtgctgctgcagtttaggctaaacaaatcacccagttgacgaagagggagctgctgccgcggtcctggcccagctcgagagaagtcttttggtcttggcctcttgctgccgctgccccccaatcggcgccgctttgcttc

SEQ ID NO: 141 - DNA, 5100 bp, Zea mays
  source 1..5100: mol_type = unassigned DNA
ttggaattttagaattccaactttgtgtgcgtgtgtgtgtggatgccaactgctgagtcagcagtgttcaaacgacgaggcgctcagagcatcttcaaaagctcctcctctaaatccagtttttttttgaaaaacacaaaaaaaatgtctccaatagtttcctaaaacgctcctaactttttcatatcccttaaaactctcttatagctataaataagaggtttttttgctctctagaaataatatgccgttttaaggggaaatgattaaaatttatcttactaattatttacatgtatcttaaaattgattttgaggagtcgtttctagggatgctcttaggccaggccggtgctcactatccttagtaccgaccaggaccctacggtcgatagctgtccgtacagcctcgcgatggtcggtatccaccgaccgtcgactgccacatatctttttttaattggtctatgtcattttatgaattatgcaactttcatttttacatattacatattttatgtttgacaaattatgtagattttatttatgatttataaactatttaatttgtatttacttttatgaactatattttttaatattgcttagttatatatctagatgtaattgtattttagtaaaatgtgtttcatttcaaataagagtatgtaaaaaggttgatgtagcgctaaggtgactataggctaatagtaaaggttgtgcactattactatgaacttgcggacaatgatagatatagattgagcgatagctgatgtggcggtagatatagactagtggcattagatccgatcttatattgctagagatacacataaacctcacggtcatcggtggcaaattaagttactaccagtaaaatgccaactggagaaggtactcgttgtggtgccattcttgcgccatcctcgatgtcaaagaaataatttcttgcgttgaggatttcgacatcattactacctgctcccacaccatcccatgcggttgcatctccttcatcctctcgaccactggtcgcttcatgatggtggtgccctcttcaccgcctccccatccggccatgttcccatgccgatgctggaccgctccaccacatatccatagcctccggctatccaccgcactttaagtcggacgatggagggagcgcaacaggcgggccacaccagctatttcttttggaaaaaactactttcgggttcgagccctttggtttagcttttgatttttaggggtaaaagccaaaccaaacacaccctaaatcatttacttagtttacgatacagatggcggtgagcttatcatgttattttatggtgataaacaactatgtgtgatgatgagttgctatggaatgatataaacgattagtttatttttagtaaacgacgaagtagttggatctactggagagccagaatttattcaaacctggacaaattaaaaagattaaataatataataaaaatgatcataggaagtatttattaatcacctataaatgtgttactgatatttaacacgaggtagacttatcttcgagttttttatgctctgaaaccgccatgttatgataatattatcaagtattttaaataattttcacttagtgtatcacatcatcaagtgattgaaccattcatctgaaatcttgttgtgcattcacccttaatttagtttcattatagagaaaactctttcaaccaatgctgttgaaaatgacagtaataatgtcaatttctcccccacttagtcatcggtgaatgtgaatttttatgcattaataacttaattagtaacttagttagtaatgtagttcatagcttagttattacataactagttaagtagttagtgacctcttagttaactagtcagtagtaggtaattactttgatagttagtagttagatagctacccaattaatagcggtcactaaaacgatacttccaatagctatgctgccaacaatgatatattcttaattttaggcagacaaatacaaggttcaagtgaaaaaagatgcacttacattgttcttgttaccacactcaaactcaagcaaacctccacgtgcaaggataactagatctccacaatcacgtacacaaagagagttatcaagtcgttcgttggcaaaaaccaaacacatgattataaatgtaaccgatctgcctaaacaactttgcttatacaccaaaatcaaaattatctacctagggttgcaaatttcacataacataagctaactcaacacatataaaatgaggaagagatgaaggataccttgctttgaaaggtctaaggatcaaatccaagcttccaaggttgaatcaatagattagagaaggctggaagaattggggacagggagagggagaaagatgagaaataaatgaggttcgccccggctagtgaactgatgttgattaaattagagcatgacgtcacgagctatgacattgaggtactgccacgtcagagccacaataacgttcactctatttataacataatacctcggtgctttgacctataacgccaagccatataacctcaacaccattggtcacgacgctcacagccgagtccaaatacggtatcaatcccatcaaggatgtaattgtaaaatttttttataaaagagaggtaaaatacataaaataccgagtccattattaacatgtggcaaagactctaagcagactaagttgtgtttgtgcgtttctgtaaaatgcttctgctgctaaaaggcaaacaccaaccaacaaaatgacagaagcacgagaagctaccttttcacgaagtggctgcttttgtatagtatcattttcagttgttttcaccaatcaacttaagactttttgcagcacatagctcacattacccttttgacatcttatggtgtttttttcacaactcagacttgaacaaaacatatacgctaagccgctaagggcctatttggttcctttggactaaaatttagtcgagtttgtagggactaaaagtatttagaacgcattaagtgactcgtaagaagactaaaatatctcttaacaatcttctgtcattagtgtaacagaaataaatgagtggcaaaaggtggaattaatatggtttagtccattttagtcaccctttgaggtactagagactaaagcagtttagttcatgttttagtcccaccgtttatctatttatggactaaatgagactaaaatagaaggactaatctttagtccccaaaccaaacagggcctaagttcactccttagttacaagatcagttgaccaccaagcacagaagtttctgataaagcatcaagaagtggactacggcgggtccaatgacttatgacttctgaacggcggagaacttgaccagaggccacctaaggaaggccttttttgtttatatatatagtggaagagtttctctcaattatttcagtgatacataatttatttatcttcgccagcacctatgtctttagcagattcaaacactattttacattagactatattgtttatatagtgaattttgaaatatacgacgagataaaagattgaatgtgtaagatgtcggacacagtccacttccgccctttctcgcgaactttgtctcctctccgccggctctccctccctggcagaatgtgacatgagaaaaaggtgacgcccccaaagtcaaaggagggggcatgcgttgcgtgcatggcagtagtgtggttgccaaatttttacactttccagtcaaatagttctcagctagacgtacagttagactagatttaattactggagacttctgtggtcgcatttgcatgcatttagttctagaagcgtcaggttagctttacaaaccaagttgtagctaggcttacagttcaaagtgagcgaagccctcacttacgcggcagctgatacagtcaactgaggacgaaggccgggcaagcagaagagggtacctcgtcgtccatgtgcatcacgatctcatcaaggccagatcgaccaccgtatctatccactagctgagaatttgcacccacacacccacccaccacgacgctacaccaaacaacaacccctgcattgtatgcgagtcagcaggtacgtagtactgcatatactgctacacgcattcaataaagggagccaattatctatatatagttttgtaaataaacaaataaaccagaaacagattcgataattaacatatctcgaactgcaggccttccaaactaacgtacgttattagaattgaaatcgcattccaaaaatatggcatagcaactatatataaacgtagactgatccaccacaccgtacccttggtatatatgagagagggttccatgttgtgcgtgttgttcaaacccttcctgacttcactccttggctggcagttgggacgacgacgaccggccgtccatgtggtaaagcatgcatgcaagatggtcattcaaggcaaatacgacgaggaaatgagacgcagacagcagttgtcacacctcgcgcgcgcgtgcagagggtcggcggcgccatactcaggggctaggggtccggatctgaccatgctgggtagaacagtaaggttaggaaaagacactttcatgtcaacgtgaatatggacaaacaagaaaagaagaccttgttgctagaaccaagagcactagcggtttctttctttcagacatttgatctatatggaggacaccatgcatatggatatccatatgagtacagaggagggtgtggataagtaagaggtgaaggaggagaagcgtcaacagtaggagaagcgttggtggtatgatcatcactgagaggagtatctatggatggtcggtagggacacataggaggaggatacgtgtatgcaaggaaaggttgtagactcaaggaacaccgtatctatccactagctgagaatttgcacccacacccacccaccacgacgctacaccaaacaacaaccctcttgcattgtatgcgagtcagcaggtagtagtactgcatatactgctacacgcattcaataaaggaacccaacccaattatctatatac

SEQ ID NO: 142 - DNA, 4700 bp, Zea mays
  misc_difference 4604..4653: note = n is a, c, g, or t
  source 1..4700: mol_type = unassigned DNA
gtctcgcgttcagtttacagtagttcgtcagaatctgttttcagcttcagttttcagcctgttttaggcagtcccgagtctgtccgcctgatgcatgatgtgttcatgcagagcgttagttagactccgcgaatcactagcagatcgtggagtggcacgatttgatgtgcgtgtgtgagttgattaattacggattgtttggtttatagggactaatttttagtccctttattttattttagtttagtttctaaattatcaaatgtggaagctaaaataaatttgtgttgtcctttaatcttttgtctatataattagttttataattatactatattaaatactcgtaatttacatttaaacatttgatatgacatagactttaataaataaaattaaacaccctataaattagttggttgcctaactatcccctaaacgtcctcgcggggcacggtaatgaccatggacaagcatcgctgaagcaaagctccacaaatccctttagacttcaaaaaaaaatcctaaattatgtcatcacgcattctatggctgcttgaaacggtaggatcacagtttaaaaatgctaggtgtatttgctgagatgcagtacaataccgcaacattgttcatgcttgaaatggtaggatcacaatgcatcggtagcctaatgccacagcattgttcataatccgagagggtggcagagaaaatatcttacgggaggatgacgggcgcccagcccacgagaacgcgacgtcccccctccgccgcggtgccacgcctggcgtcgccctcaccctcgcccagcaccactccaccagcgagagccgccgcttccctcccccagaatagcagaggcgggccatgtttagccgcggcggcgagaggggcatagtgcagggtcgatcggggctcggaggcccccgagacgcggcgggttactcatagtgattaaccggatcatagggtctgcatgagcatgttaggtgacaaaggatcactgaattccgatatgtttgttccttgaacgagatttacagtttttttagaaacatactgtgttgagctcaatagatcccaacacgcacttagggtccgtttggtacagttccagttcctgattctttagctctagatcctaatccttctaaggagctgatccttctgattcctggagaatcggaatcattttttaaaccgtttggcaagtaaaatgattcttgtctagttgacatctttagaagaattttctatttcgtcttgcatacaccaaacgtgcgttcaacaaatcaattacaagcaataatacaaattgcgggtaattttgggtaaactttgaggggaggttcatatttggttggttgaggagctgttttgagggagggtggagcagtttttttagctcccacatttctataaaaaacgactcccaatccttcctgctccacgtgagaatcagttcacaaaacacttgtttggcacggctgctctggatctccgtctaggatcaggagctggagctgtgccaaacagacccttagactgtgttgagcggttccctctaaatttctccccctatatctcactcacgtgccacgtcagcgttctctttccccctatatctccacgctctacaacggttccccctatatcaaacctctataccccaccacaccaatattttatactttcgtcatcaactaactcaactaccatccaatatttgttttatttttatttgctctatgaaatagcaaacttagtaattagcaaacttcgtaattagtatacttagcaaacttcgtaatatttgttttaacgtctgttggcacctttttggggcgctaatcactcaacaagaaccagcggcggtgctctctggtcagacgcggacggtccgcggcacaggaccggacggtccgcgacctggcgcgaggctagggttccctgcctgacggccggacgatccgcgccctagggccggacggtccgcgatctggcgacagggtcgccttcttcctccttgctggaatctagatctcgtcccctaggggaaaaagatcttaaggtgctctgggtcgacaggtcacccagggcgtccccagacgacgtggagtcgcataggaattaagagatcaattcgaggaagaggtcttggatggacaactagatcttaccccccgggaggggtgagatcctggggtcgtcttgggatcggcaggccaaccaagacggatctagacgacgtagagtcgaatagggatggaggtggatatgtgaaagactacaactagaactatgctacatctactcctaaggtaggaaaagtaaataaggtaattggttcaattggaatgtgttcgggggttctcaatcggtcgtacccctttatatttataggggaggaggtctggaccttttcctaagagatagccaacaaactcccacgtgattagatggataaccacgcacgagataaggataaatatccgacttaatctaatcccgggacacgcggaccgtccgagcccaagggccggaccgtccgctcattttggtgcccaacatatgcccccctgccttttggtggagcttggcgaaccaaaagcatcagtgaaaatttcggaaataattgacctcatgagcttttgttcccgatttaaggactcagctcgatgcaagtcatcggctcttgcgatcagataatataaataattgatggaactttaatgcatagaggccgttttggatcgcatcctcttcagccatgtctacctgatcaacctgtcaatacgcaaaaacttgtggtgcccccagcccaaataagcaaacgtattgggccagtaatacgaattcatcgtcgtaccaccccacacatgagcaggacaacacatcggcgatggatagaacgggacgcaccatgctatccctggaggaggatgacaaggcgatcttggttgtgctaccttttgggtccgtttagtcggcttttgctttcgcacagaccgcccttttgacttcgtctgctttattggccggttgtgtggaacgaccttcttcgtatatttggcaagcaactgaccaaaagtagggccgactctactgagtcgtccaaacgtcttaatagtattttgtttcctaacacttgttttggaaccttgtggtccggtggtctgaggttgctgcttctgactgtctgcggactgtccgaccattatagtcggaccgtctgctactgtctccgactgttcggccttagtacccggatcgtctagcgtacgcaggacaggtgaccgtggtcgggtgtccgatcgtgcttgccccccggtctttcttttgtccggagtcttccgagtaaccattatgcgtgacatatttggtgtacggggatcaccaatgacgatatttttatctttgcttttatcgcccgcacaaggccaaactacgacttttttgcttgtcggctctaatgtggtggcagggacaggtggcctgtcaatcctcacctccttttgaaacctcaatcggccttcatttatagccgattgtatttgccgacgaaagacaacacaatcattggtgttgtaacacccctggtgttactgtaactaaaacttgagcatggcatcataagcattggcattgcatatgtttgatacacctagagtgcattcactaggcaaaaatttcaaacaagttgtattgttttaatgatttgcaaataggaccctggataggaagctttaaccctaaatagggattaaaggggtaaaacttaacctaagatgagaaaacctaaaagctttagggtaaaagtcataaaatgaccccaaaaataaagttgaatcacatttatacccctgggataccagaaaccctaattggagccctggaaaaccctgaaaccaaactctaggggcttatgtgcaaaagtgatgaaactttggactaaagtgtaaaaactaccatgtttaaacatataaagtcatttggttcacaaatatgtggccttgaaagccaaaccctaagttttggacttaaatgcaaaatggacctcaattgagttctattctaagtctgaaaatcatagaattggctcaactttggagctttgcatctttcaaattataggggttttgccctaggtcaccacatcaaaattgtagcccaattataggagaacaactttgctaaagagtgtgagctcagttgttaagaaaaatttggagataatcatgctcaaactttggctgtcaggctggattcattctgaaattcagcttttcagtgtaacagggtcaactttgagtatgaattcaaccttgatccagtactcaaataagtttaaaccctatagtcgagttgtagctggtatgtagcactacaactttgatgcagagacttggacctgttgccacatggaattaagagaaattggagctccaaagtactctgtcagctgctctgaattggtgttcgccattgtacagtagctgaaacagataaggtcgccagcgcggctgtctcagacgccggtggctttccgccgtgattcacgtcgccggcgtcacgatcggccgagacgattctttagatcggannnnnnnnnnnnnnnnnnnnnnnnnnnnnnnnnnnnnnnnnnnnnnnnnngtcggatgaatcagcttgattcgtatctttcaattataggggttttg

SEQ ID NO: 143 - DNA, 3000 bp, Zea mays
  source 1..3000: mol_type = unassigned DNA
cctctcttggacggtcttctggtggcagtctaccctgaagtgcgagaggtaccacttatccgccaccttgagcacctgatccttttgtcggtgggcctccttgtctattttcttcatgtcatcttctaatctcttatgctcagcggccgataaattagtcagccttgtgttgctgtttggagaagcaccgttgagatatttagaatcggccatgtaagcatgattttataaatatgcaacttcttccccagcggagtcgccaaaaagtatgttggcacctttttggggcgccaatcactcaacaaaaaccagcggcggtgctctctggtcaggcgcggacggtccgcggcacaggaccggacggtccgcgacctggcgcgaggctagggttccctgcctgacgaccggacggtccgcgccctagggccggacggtccacgacctggcgacagggtcgccttcctcctccttgctggaatctagatctcgtcccctaggggaaaaagatcttaaggtgctctgggtcgacaggtcacccagggcgtccccagacgacgtggagtcgcctaggaattaagagatcaattcgaggaagaggtcttggatggacaactagatcttgcccctcgggaggggtgagatcctggggtcgtcttgggatcggcaggccacccaagacggatctagacgacgtagagtcgaatagggatggaggtggatatgtggaagactacaactagaactatgctacatctactcctaaggcaggaaaagtaaataaggtaattggttcgattggaatgtgttcgggggttctcaatcggccgtacccctttatatttataggggagaaggtctggaccttttcctaagagatagccaacaaactcccacgtgattagatggataaccacgcacgagataaggataaatatccgagttaatctaatcccgggacacgcggaccgtccgagcccaagggccggaccgtctgctcattttggtgcccaacaacgtccaattttcttgctctagcacccataacatgatagattcctgaggggcagaatatataatttctttatctccaagactccaaacagctaagaatcacaaatccagtttcctgccactaacggacaactcttaaagaagtttcaagctagttttcaacttaactttcagtaaaattttccaaaattcaagtagatttccatagaaatctgaaaacaacattttggtccaaatccataccgaaaatgttcttcttaatcttctacttctggtattccctaagaattagctgtatggtgtcacattctgacatgtattctatatagttaaaaaatgttccttattacaaacacaccaaagctgtaatatccctaaagttgtcatctctaggtaaaaatcaactgatttcacgtttgaattaacaacactaatttatcatgacaaggtcctggcttaatgcctttgtatggcaagggctcacctccagtaataagcaggtagtggttgctacgtgtgcaatttatcatatcctgatacaaaagacaaaaccacatagtagcgtaacttcatcagccaacattcttttgggcttctggctgtgaaaatttagatacggtaggtttttgttccaacaatttatgggaaacaaatacaaagatcaacattaagtcgtgcagtttaccattgttaaacaggcccaaagtgattatatatgcaatacaaatttctggattcttttgcaaattctgcacaaaatatgtgcaggactatttggttgtgaactctcaagagcctcgccaaagttttggaatagccaaaaaaacaaacaacaacaacatttaagcaagagaaagtagaaaacactcgttgtttagattggccatacatgatataactggattttcgttgttagagttgccaattagtgttactgaatttgcagtgctattagtttggcttgatatagtagaagaccaaacaggatgcatcaataatctcattatgggctatggccactccaggatacctttgcatccgaccacaaaatgaacatatcgagccaacaaacgcaccacaccacagcaggtacaactcaaactaaatggacaagaggaaagcataaaccattcacctgtttgaacagctcaatccccttccctatggacactagatccaggttgtcgtcgaagcaatacacgtgcacgcggctcccagagctgccggcgtcaaatatgacggcatacttgttcagtccgtcctcgacggcccggggtccccacctccgaccaccaacggcgaggagcacaccccctgaggcggtggccggcgcacgcggcatgagaaggcgcacgcggcatgagaaggagcacgaacgagatgaggaccaccgacgagagcaacaccatcagcacccgacggtaccggtgcacgcggtcggccaccgcctccgtttgctgctgctgccgtgctccggcacccgagtagcggcgaatcctcgcggccaccactgtggctgccgcggcatccgccgcgacatcgtcagcggggagcagatcgaccgccgagggcgtacggtagcggatgcgaccgttggtcggcgatggtttcaccgcctcctgctgcggcggctccagcgtgtcggtgcgtgcggcccggagcaagaaaatcgaatcgagggagagggcggcgcgacgggtaccttctccggcgggccgaccgtcgcacttggttcgcctctaagaccgtcttcggagtttttcgaacccgcgatgtgtgggcgaaagaagcggctgcgggggaggaatgcggcgtagcgtggccctccatttagcgtgagagagaaagaatcgggaaggaagaggaggagaaggaggacgccggtgaaggggaaggaggcgcactgtagcccctatatcggctaaagtgttaggggagggggagggctgcgatgaccgttgaagacagtcttaggagctgttcatttga

SEQ ID NO: 144 - DNA, 2600 bp, Zea mays
  source 1..2600: mol_type = unassigned DNA
tgacatattgaaaaacgacgtcattgcagatcccagatgacttgactttgaacagactagttgaagaacatgaatcctttcctatattactttgctactaccttttatagtacatgaaagaagaaaagattatatattggtttgactatagggcctggtcagctgtggtctaagtccaacaaccccaatctatcttggtcatagcgccatggctttgatcgtactatagtcctgttgcaggggcagaggtgtatctataataggggtacgttgtcatgttgtatcgttgaacactagatttcatgacgttagtcacaacgtagtaatcgatttagtaaactatactttataatacttcatcgtacactagtgtgtccatgtgtggctataggagcgatgacacagtatcggatagtggtctttagtgcgtctgctgcctaagtttacagtgtctcaggtctagaattttaggtccttttctcatagggtctgttcggttaggggtaaccgaataaagtcttagagccggttcgattattcaggaatctagtccaggaagcatttcagctggaataattatataatttgtagtataacaagttacttggaatagttactagtcttattccagtctaatcgaacggggccttaaggtgcttgagatcgaggtcattaggatggtggacctataactttgccaaagcaaatgcaatgcaaggtatatcaccaggagatgtgcctcgtataatttgaaggtacattcggtgatacgccctttctcagacgtcgacagcatgcatatctaactctgtatgcaaaaaaaaaagacatatgaacgaagaattcgatcagcacacgcatgtttaagcctgcaccagccagccagccagtggctcagatcttgagacgttgaatctatccagtcaaagctggatgatgcatatggatgggatttggtcgcagtacaccttgtcggccggaaggaaagctagctctgggacagtgaggaggggctagctgaggcctctatcgggcgaaaaggagacgagcactgcccttcgccgctgtcagcgcagcggtggagcacgatcgctttcgagatgagaatgagatagacgacgacaactgcatgcgttgatgtgccatccgactgtcactcgcggctaataattacatccatctctgcaccggccgggccgggccggggtggtttcagtttcatccacacaaacaaaccacacactgcagatccaccggcatgtgtagttgcatttcattgcatatcaaagcttgctgaagattgattgatgctggcgtggtgtagtccatgcgttgccgacagcgtgggtcgtcgacggatcggatgatctacactgcatccactccacgcctttaatttgcggctagctccacttggcgggtccttgatttggctttagaagagtcagtgcctgtctgtgctccaactagcttattcaagcacatgaaacaaatgcgcgcgcgcggcagaaatctgtacagcgcggccaggctcgatctatctgtgtggatggatgatcgagctgattagtgcgcgacgatgcttaacgagcaatccagatcgatctccagactagtgtcgtcaattcgtcatgctatattattggcaattggcattgtgcttttcaggaggagatcttgcattgtgaagctactatcaggctttgaccaaatgctgcaaattaagccagaggtcgttagtgatgaggcctgagggggtgcagtggtgtcactgtggcctgtcggggtagtgcagtggtgccggtccacatgtcggccgctgccgcagtctgattactatttgtcaatggccatgcatgcgcctttgttaaaaagagagagagacatgcgcaatctgattactatttgtcaaagtttcctccacactaatttttttttacctccacaccatctctctagctcaccatgatatatacaagaattcagtcaggctgtggtatgtggagcatgcatggaaaccaaagtctcatgatgggagcgacatgattagctccaagtttagtggacaatctcccggtcaacccctggcctacactaaaaaaacagaacgccctgcatctagtctactagagaggaattggaataaatatttagcggcagattgcattccagccacacgtgagtcttttctctctctatatatattaccctggccacatagtgattttctagcatgatctagtagtctaacctctgatggggacaagcatatatatgagtagtaaggtggcgcctacgccagcgctagttattaatgggatgaattcagagaatcagctagcacgtagtagccatttgttttaattaaatgcgagaatcagctatccatgacaggagcatcaggcaaagcacatttgggaccagggtgtgtggcagtggaagacagtaattaacgagagttaccttgttgctcttgcatccaacacccactggcttatcctagctagtgcgcttcgtatcaatccatcatgaaaacctagccttgacagccagggccaagactgggctgcctgccacgccataacccattaatctcatag

SEQ ID NO: 145 - DNA, 3397 bp, Zea mays
  misc_difference 1733..1782: note = n is a, c, g, or t
  source 1..3397: mol_type = unassigned DNA
tggaacaaggacgaatcatatgtttgaagtcccagctgaaaaggctgcagtcagtcttagattcctcaaatgggtctcctgcagagctttttggaacgaaggtattcccataactaggcttcacaaaattgttatcccgaacgaagtaattgtatttctagtattataccagccacacctttagacttctagtatcctgattgaatttaaccattaacactgtaatggtaagcgataagcttcctaacccgacgtgctcgcgccggcccgtgcgccgcctccccatcctcaactcctccagatcagagcagatcatatggcgcctccatctcccctgctagtgcgcggtggacggcagtacggcacgctcggtctcggccacggcatgttcttcgaggcgttcgccgtcgccgccgatatctccttcgcgcacatgctcacctgaccaccgtcgtctggaatgcgatgcggctcgctggcgttggaagcgagaggcggctccacgaggccatccacatcatcgtcgacgagcacgtcacggcgagcatggaatcagaggagcggtcatgcgacgttagcaacagcggctgctgcgatgagcagcacctgttatcacggtggtcacgcggcgtcggtgacggcggctgctgcgatgagcagcatctgttgtcactgttcgcggcggcgatggaagaagagggggcgagctcgacgctatgtgtctggttaccggtggcgaagcagcggttcctgtgggacatcgtcgttccacagctgttggcttgttgctgccggggaacgacgaagcgttcgcgggtacgccgggagtagacgcggagccgcagcggggaggcacgacgcggcggagctgtgcagtgcaggagctgcgccgaggacgaagctgcgagtcaaaggcttggactggcagcgtttccggttaatagctgtctacgatggtaaacgtgggaacgatagcaaaaaaacaaacatcggactgttatagtactaggaatccaattgcaagattcggtatactaattttacgaagcccgtttatctggataccagcaatccaaaaggctctctcctgcagctggttttgtccacatggcaacctcctgcctgtcgactcctggttccaagatatacacaagcgaggaccaaatggtaatggtagcgaccatttgcctgacgaacccttagcggaggaaaaggagtcggaggttctcgcgttgtgagttctcaggagctgctgcccttcacatctacaaatgtgctgccattggtctgaacaaggggagatgagatgcaggataacagacgtgatttggaggttgctcattcagatctctatccctccgttttttatttttcgtgatttagtttaaaaataaattaggaaacgataaatatttaaaaacgagcgacaaatattaaagaactgaggtaatacgttcgtatgcgagtttctagagagtgtggctggcttcagtcgtactcgtacatggtcaacatagtttagttatcaacggtgggtgctacgtagattcacatcttgcctgaaatttatttgtttgggacttgtgagccgctagttactgcgggcttgatagacaacgctaaacttcagttgcatttcaggattttagttcgttgtagggggaatgagctcatggatattgtggtcgctcgctgcttaacgaatcaagctgatctcgatagtgctaaaaagnnnnnnnnnnnnnnnnnnnnnnnnnnnnnnnnnnnnnnnnnnnnnnnnnnatcattatgacttctaaatatcatttacgtttaaccactctgaacctcactgtggtgtctgaatacttattaaacgacagccagagccaccacctatgagaggctgaaagcaacggtgccgccggagatggagacgaaaaaggaggcggcagcggcgaggcaggcgaaggagtccctggagctggcgttccagatgtcccagatcctcgaaaccggcctcgaccgccacaccctgtcgctgctcatggcgctctgcgaccgcggcgccaaccccgaggccctggccgccctcgtccgcgaactctcctccactgctcccccaaccgccgccgaggctccctcccccgtgagcaacgccgccgcggggccggccccggcaacagcgtccatgttctcctccggccttcgccgtccctagggtttgtgatgtcccttttttcgccggtgagactgcttgccagttagtcgactagatcccgcagtatgcactcagccgctgtgagtgcctgaatgtagtatgttcttatgttttgactaaatttgtgcctcacaagaagataatggttcaaccaaatgccatatatcacgttactgcgtagatgtgctgctacctgcatttggcatcaagattcacattataatgtctatgtttgggttataatattaatttgcagccaggtgtttctacaaatagtcaatctaggcatgggcatatgaactgtgggttggttattctttctatgcaacatcaacggttgtggaactttctatctcttgttctctctggctctgccacccttttagctacaccttgtcgggtagtggtattgccatgatatagatttgttgcagttgctagtagattaatgggatgcttgttgcttggttgacgaatgggttagtacatcatatttccactcctaacttttttgtttgatttgtggaatggaatggattgatccaccaccacatcattccttataagctattagtataaccgcatgccactaaaattcatgggatgaacacatgatggaccacctcgcctgtgtccggtgtccccctccccccgactttagtgtccataggattttgtggcatccctttcttccccagtgagattgcttatcatcagccaaagtgtcaaactagatcccacaatatgcatttagctgctgtgaatgactgaatgtagtgtttccttctgttgattaattttgcatcttggcttatgattcacacttcacaagcagataatacatggacttgtgtagtcctagatgagttgggtcagacacaatgtgcataggttacatgactgcaaacatgtgacgcgtcctgcatttggcatcaagattcagagtataatctcttcttgggtcacacaattaatttgcaatctggcatttctacaaataaagaatctaggtatgggcatgtgaactgtggggttggttattgtttctatgaaatgggaatagttatggtagtatgtatctcttgttctatatggctgtaccttcttgactagtggtattgccatggcataggtgtgttgcagcaaactattagattaatgggcgattcggttccgcagctcttttctctccttctc

SEQ ID NO: 146 - DNA, 3400 bp, Zea mays
  source 1..3400: mol_type = unassigned DNA
cgcttctcttcataattaaaaattctgaacaagaacactatcaattagtaaaacctccaagacaacagacaagtagataatgagcaaaacagcgaacaaaaaaatcaaaaccagtagacgaagaacctacgagaggtcatgagtatacctaataatctgatatatattgaagatgatataatctgatttagagaaggactgaagggtggcagaggcagggcattagggcgagggctctcagtttccggcgcgcgcggcgggctacagacctgcagcaaggcagtaagctaattacgtttcactaattgggctacgtgctacggacctgcgcgcgtcgggccaaggagcgctctctgctgcatcatgggtgatgggccttagcgtccactcgtcgtctcgtccaggtatatttttctttctttttccttttttagtttctacatacaacaatattattatataatatgtaaatattcactgattttgcaggatatgccggtgcatacccgacataccctatgtgtccgccactggaagcgggtactctcaaagttggacacaaattatctacaaagttcttcccaatattatatggaggcctcagggaggctcataagtcattgttgggcagaaccaatcaaggcatcatgtaagtagtttgccatcacctttccatccccgcacaatggtgaggatggcagtgacgaagatctgtaataactcggtgggattgatagtcccatcatacttcttgcaaaggttgggtgaaattctatagacatggtgcctattagaacactagggtgagcgtcatatagccagcaccggtgggatggaccacctaaccaacatggcctataggtggcgccgactccatagagttgaaaggacctagatagctagatggagtgaccgatcaataaaaatattacataaaccatacaatatcaggtagagccaacatatatgaacatggggaaacaattactttctatagttttgttctaggttatttcttttgtcaaacttggagtttgtgaaagatatgtatgaggaagacaaggtactcaataataaagggaaataatattaacactagctacagaatgagtagatgaagtaatatgaaccaacaagtaaatgtaattgcaatatagtttaaagtgcaaaccacgtgggcaagagatgaaacaataattatctgtaaggtttagattcttactagcatcctacgtccccgttgtggcgagtctaaactaggtgattcacgcactatctgacataacaaacagaacacataaagggcactacaagaatcaagctagggatacactcctacaagccattattccactatagttgatatttgtgaatctcccacaaggaatgagcacaagagtccctcgcaagaatgatcaagtcgacaacaaacaacaaagtcgctcaacgatatcatgcttccttcaagctatctaggtgacaacaaccaccaagattaacaagaatattgtagttcaatatgatcactagtgccactagatataacaactcaatgcaaattattagagatcactctcaaagtcactttggatgaaacactatcactagtggtgagtgcgagatgttttcttaggcttactaggttgtatttcaagttgggaaaccagaatatccacccccaaacctaaccaagctctatttataaggaatatatattgtgcacaagaccaccgttgtgcacatatgcacaaactcaatctaaacccttcgtttaatgatctttagttgacgtgaaaacatcttctgcactctcctcccctaacctagctacatatgtgcaaaaaaaccatgctcgatcgaagattgttagatgaagggtccagattgagtttgtgcacatgtgccgaaggtggtcttgtgcatagatatgttgccctatttataaggtcccagggggaaactagccattggacttttactatgttgattttagggttgttggacgatctaatacccaccaacggaccatgtcgctaggttccgacgactttagaacatgccacatattagctatttcaatgttactattgtcgccctgatgattgctatagtatatcgttcgacaccctctatccgagaaccatcgaaccaaagtatctagagtccgatgcccttcgtaaaaagaccagagatctactggtagtgtctgaataatatgatgtatgtttttagaccaattcataggatatgatggttgtgttcccattcaactagtatgcctaatagtgggtacattcaatgtatagtgcactcattattcgattcgatgcacatgtttttcaattgtcaaactaattcttcagggtccaatgctctactgaaaatgaattgagagcatttgtgtcatggtttttataggtaccctatacatgaggtacccactcttgctaggtcaagataagaccccaatggatgccattaagggttcatgggtggccagcccaacacgggggtaaggcctactgtatgaagtcgtggcccagcctggactcgtttcctgggctagaccgccaccaccacaagcacccataaaaggaggaatcaacaacttcagctatagatatggattcttgcgagtggaactcggacctcctcatcggacccctttgagaaaggggtacaaagggtctccacgtccatgggaagaagacactctttggctgcagcactgaacctccgggatggttcccgaccagttatatgtcatccggacctcaagccaagtggggtccggtgccgccatgtgtctggaccgatgcagttggatccaggccccctcgggcacggttcggggccctagccagagagggcctgggaatgctgtgtccccacatattcctgggcctgccccctagtccaagacagaggtctagtgccaacgagtggccaaacatgtctagcgtaagccaccggacagtgcctgatgtatgcctctgacatggggcccactagcattaggtacggatgggatgcatacttacccgcgccagcggcgtgtagcatatcccctgcattaaatacgtgcgacatgccaagcctgcaacttgcgaattttactgttacccgaatgttacctaggcaagactattgacccaatgcgccgcttaggcgcctttatttatgacttcattgctccttgtgcgttaccgaggaatgaagagacgtgtggaggagacgggacaatactgtccacccctacgcacggcagagtttcagactatgccacaacctactccattagctacgcctcgaccttgattagaagggatgagaggataggatatcaggagccagcacaacgaccaagaggagatacacgcttaggaagatctagtgtcac

SEQ ID NO: 147 - DNA, 3600 bp, Zea mays
  source 1..3600: mol_type = unassigned DNA
caagtcaattttggggtcccattttacaaaaaaaaagagttttggcctcatgcttataatcagttttggtaaatcatagttatcaatctcgttcatcaattaaaatcagcgacaaagagtatatatgttctatatgaccatatatacctttgtatgcgtgatagacaatgaccttttttaatagaatcgatagagcccagcacaccagtttagttcatgaattaaaatttgataccagatgttaagaaaccctataaaaggttacgtcggctagtatcaaacatatgcctgagtcactctacctttctatataataaatttatgcccttataatgataacgagaagaaaatgagaaaaaagaataaaatatttcttgtttaccgataaggggaaaaaatagtctttgacatgtcttcattattgacggaacattcaaaagccggatcgacatcaagaaatgtttggttccagccaactaaattttagtttatcacatcaaacgtatattcgaataataattacagatattaaatgcagtctaattataaaactaactatacaaataaaaactaaaagacaagcctaatcaagccattatttaatattcataattattttaaatacttgatgtgacagttcggaacgaaacatctccttactggctaacaaataacaaccaacccaccataaaagagcatccacgcgtaaagatgcacggatcgggagcagctagcgcggggaagctttgcttggctgccgcacgcacgagttcgcaaccaatccatcgggactcagaaaatgggatctgggtcggcatatgctccagctctacgacgatccttcgtactagcaatcgtcgtcgccggtaacaaacatctccagacactagggatctgatcggaagggggaaactgtaataaaaaggatttaaaaaaacgctactggaccccttacacgactgtaccgaagttattggtcgcgtacaaaaatatcccgacaagaaagagcatcgcaatcaggcgtctgcgtgtgccgatgggtctgcagcaacgatcgggccccgcctcgtgactggccaatcaggcatcaatggtcgatcgtctaaactggggaatctcacgccttcatttcaaaggaaggccatataaaaagcaattttcctagtacgcccatttccaaattgtaacaggatttaattttagtttttattacatactatctctgagaagaatacatacttttaatatcaaattgatttataaaacaatccctatgtgcactatagatagaccgtacgtagcaaataaaagcatatccacgtgaaacacgccgaccaaaaaattacgaggagaaattcctcgcatcatctcacagcaaggatcactcgagactactttgtcgttaaattccgtagatgtcatagtacaaaccaactcggcaatcggtcgtgtgactgctcccaaaaactagatctatctcaatgtgtgctacctctttagtagagcaagattttggagacactgctctccctatcgtcatcatcatgccgatgttagaggtggaagcatcaaagggcgcgcgacatcgagagctctctcgagattggttgtttcttgtaattttagagaaaatgaactttctattatataggggggacaacctttgtgattacccattacctttcattataggactaaacttcccatgatttattgactcatacacgaatggatatttgagatttattctatgaattacttggaggaatgtgggggccaaagaccagataatttcaacaatcctccaccaaatctcgaaagcaacacttaatcggctctcaagaagtcctcaagtaccgtttggcatatcaactttatgatggagactgtttatctttcatgagctttttagagaatttccacaattcacagatcacgaccaacgtcaacccataccctgcaggacgatatctcatatataagccccaaacacattaagacaaaaaacattctaccttacagaccatagagtattacatcttcactagatagtgtaacataatgtgtactcttgttacatatacaagttttttctagagtcccaacacgttggatctcctatcataacgtttggtttgctaccgtgcgtaatccaggtgggtctcaaactcatctccttaatgcattatctatcatgtttcaagataaacctttcgtaaatggatctgctggatttttagccatgtttacataattaggaactgtcaatccagaggtcatgcaacatcgatgagtctactgagattgattatttctcgtatattttggggagaatgtcatcttattatatctaggagtatgctctcgtgattactgaaatgttttggtggttagatgctcaacacatattgttttggttgatataagctaagtgtcaagagatgcaaatggaaaaaagcaaggtatgactctagctttagtaaattgtttttggtactaacattattctactaagtgcaaagaaccttgtcaaatcgagaaaatcggattggagaagtttggctaagtccagccaaacttgcaccagctcgcggtgcaccagactgtgtctggtgcccaggctggcgctccggtgaactagccgatctcgggaaaatctgagggcgtcgcggctataattcactggactgtccggtgagccagccgcgcccacgccaacggtcggccgcgcgatcagcgggcgacacgtgggcttcgccaacggtcaccaggtcgcaccagactgtccggtatgccacgggggtcggtggctgcaacagtcaacttcgtcagaaaaggaaggaaatcacgcactattcactgtccggtgcgcccatagacaccaggcaactaaagctttccaaatagagttcaaacggatcctagctaccttggggctataaaagggactcataggcgcatggagcagtacaccaagcacccattgaacattctaagacgccaagacttcgcatacacgtatttggttcatcatgatagtgaatcgagcacttctttgagttgtgactatgatgtgatgcttttgtgtgctcgttcttgtcttgtgtgcgtgttgttgctacactctcgctcttgtgtgttttgctattcccccctttactcttgtgctcattcgagatcatttgtgtaaggtgtgagagactccgaagtgtggagattcctcacaacggtatattattgagataaatagaatcatggtattcaagttgatttttggatcacttgagaggggttgagtgcaaccctcgtccattgggacgccacaacgtggagtagccaactattctacttaatcgaaccacgggataaaatcgttgtgtcaaatgtctttctgagcaagtagatccaacgggagagtgcagagagtgtttgcaaagttccacggggaatgacaatagctctgttaatctggcctctcaagggcactgtacggtggtatttataggcacccgagtgaccaccgtcctctggtaagaacgtttatgccctcgggtacccggactatccccagaatattctcgcaaggggaggttacagacc

SEQ ID NO: 148 - DNA, 4000 bp, Zea mays
  source 1..4000: mol_type = unassigned DNA
tgcctagtaattgatgccattgtgtaccaagggccacaacacatcaacactcatcacaaagaagcaaatcagtcataacataaagacaaacaacacaagcatactacaacaaacatcgcatttctataagttccttttaattagatggtggtctttcttgaaaagggaataactactctccaaggtcgttgaaagacgaggagaagaacaagacgtacgggacaggagcatgagcacaacaaaggatgtagttgaagcaagacttgcaaagcggcaaaggaggggaacaaccatggacgggataggtaaaacaacactctcaaactgaagtgggagagagaaggctttaaaatgcaggtacaagataagcatcaatgtaaatatcaagagatgacaagggttaaaggtaatagcagataaacacacgacaaaggatgcagttgagataaaacttgcaaggcgacaaaagggaaaagcaatcaagggatagataggtaaaacaccactctcgaactgggttggaaagaggaggctctaaagggtaagttgaaactaagcatctaggtaaatacataaatatcacaagggtcaaaggcaatgacagacaagggtgtaagagaaaagataaaggcacagaagaaccaagggtacaagtacaacaaaaaatggagttaagacaaggcttgcacatgggcaaagaagaggatacagccaagggtgagataagtaaaacaccattctcaaatcgagatgggagagaggagatttttaaatagcaggcatattgttgtcaagtactcgggaaccaggtacccaaaatagaccattcaaaaacgaccaaatccactgaccaactctgtgaggcagaccggatgaccaactctcagaccagatgaccaactctccgatgatgaccaagtctccaatgatgaccaactctctagtgatgaccaactatcggatgatgaccaactttgccgaccaactctgcgagacagaccgaatgaccaactattcgatgatgaccaactctccggctatgaccaactctctgatgatgaccaactttctagtgatgaccaactccgccgaccaactctacgagacagaccgaatgaccaactcttcgatgatgaccaactctcatatgatgaccaactcttcgatgatgaccaactctctctggtgatgaccaactcttcgatgatgaccaattctcggatgatgaccaactctgatgaccaactctccaccaatcagcttcggtcgaccaatcctccgtcgagcaacccagcgaggcagcgatctaagtccagcgttactaatccatgtcagctatgatgggacacatcaccatcaagacatgtctggatatgcgcacatcacaccgaatgggcaccaggatctctacagtgacccatacatcggaaggacgggataacacgctatatcgagcgtgcgcctgcacgagctggcaggtggcgaagggcccatgacgacaggagaagccatgccccatacgacaacactttgatattgattcgtggaacccattatgaagacgtcagcgatggactcgctacaagagccaaagcagcgggaaaggacgacgtcgagccaggagtacggctacgcatgaccctacgaaggacccaccacgccaacccggggagtagatctatctccctatctcttgctttctctctccagtagaatacaagtcccactgtaaggttctacacttgagatacaaaaggatagggcccctccttcttcctacacaaacacaccagttgtaacacgctccacagcaatactatgattagcactacactagactagggcgcaagcctaaactaatataatcccccgtttcagatccatcgttgagtcctagcgattcaccattcagagtgagtccgcactagcatcccccaccgaacacaaatcttattgccccctggattccgaaaccacgacactatgctacacgaaacatacccaagaaagacacaatcactatcattggtccaagcttgcactttttattaatcggcacattgactttcgccatgcactcccaagtgtgcaagtatgaaagtgatggttttcttccaacccacttcccataagaggtttttatcttctttgcccataggaattctattcagaacatgacacgaagtcatactgcctcccccaccataccttagataaaccacatgtgtctaacatgacatttaccaagtcagacaacgtacaattttcctctcagcaatcccgtttgattcagatgaataggaaagtgtcctctcatgaataatgtcatgttctgcacaaaaagcatcataactttgattcggatgaataggaaagtattcaccgccgaggaggatcctctgtggtcggacatctctcgagtcgattacctaggtgaacatgtagcatcaaaattttaaacatgtaaattttagttaaaatactaacaaagactaggaaattatcaactcaccgtccatgcttctttccaccaccaccgacatgcgttgccaccggatcaattggtccatgccgccaatcgacgtcgtcgctatatggcgtcacatcatctcctacccttatttctcctacaattaagaaaacaaatttagaattggatgtttcaagactaactctaaattgtaaataactattcaatcattcagacatctgctgactgcaaaggaccttaatctatgtcgggtctgatcccctatgaccctagatgtattgtcaataggagatggatcaacaccaacttcaactttctgtatatagcaattagtaacagaaaagggaaaatatgttcttgaaacggtatttgacatatctcgctataagtcgacacatacgaatgtacctatcaccgccaaacgtatactcctaacccttattagcgaagctactcttcttcgtggacttctcttgaaattcttgagaataccataatcgacaaatggtccaaggacaatcttctagccacgagagttgtacatgcacatatgttgatgtatcaaaacaatagtaatacattaatatttaatttcttgataaaacaattgcactagtgataattgcaagggcacaataacctaaagtaagcagatcaatggaaatcctagatatgacatagaattattgtttgaactagcataatgtttcgtgaatttgtattatccccattgtagtgttacttataccataacaagagtggaatactatagaaccgtaccagacacccgagcaggcgaagtagtggccagggatggggatgatggtggcaccggggagccaaaaccgagacactaactaggaaatgcgggtgtcacatgcgcgagtgcagggggttgtgggcgcgtgcgtcgctcgtgtaggcggcgcgagagaggcggtgcaggcatggctcgactgtggactgagggcgacgatggagtgtggcggcgttcaggatcggtgcaagaaaacacgataaaagtgatggacgacgattgtaggaggaagaaagttgagccacctctaaaaacacttaattttcgacgggctctggttgccatcgaaaataaactcataatttttagcagtttataatcagtcgtaaaaaatagcaacattattttcgacagataagtgacaacattaccagaatccggctctttatcgagtgctcggttctttgtcgagtacattttgtcttgcattcggcacagtcggctctgccgagtgccgcactcggcaaaatagtactctcggcaaagacaacgtttatcgagcgtgcgacactcggcaaagactaacactcggcaaatcagcctttaccgagtgtcggcgaaatgcaactctcggcaaaggaccgtcagcagcagtctatagctgacggccgttaactttgccaagaaccaattgttgacactcgataaatgttgcttctttgctgagtgcgcaacttttagcactcggcaca

SEQ ID NO: 149 - DNA, 3900 bp, Zea mays
  source 1..3900: mol_type = unassigned DNA
ccgcatgggtacgagtataagtaaaattttatacccgggagtatatatgcgtaatccgacagataaattgtttttatctgtataggtatagaatggtactgtccgacagtccgttggcatccctaacacggcatgatgagcaacagggcggctgtcggctggccaacaacacttgtgggtccgcgtcatgtgggactcgagtgggcgctggtgggtaccgttgggccggcaccgtgtgcttttggtggtaggaacgcacactgccctattgggctggagtgggccgcatccaaattgattcgatcttcttgttggaaggaaaggccgcaaagttcttagggtgtgtttggtttgacttttggctttggcttttgccccctaaaagccaaaagccaaccaaagggctggatccaggaagcagctttttctaaaagccgactttctcgtagtgcaaatctgaaagcacccttggacctgcttttagtgacttttcggatggaactgtgaaaacatatatcgaagaatttttaacgacttttagtgatttctaccaaacggtttttagctttttaacaacttacagcatacagcagctttttctacagctcacagcccacagcaacttttttcacagccacagcccaaccaaacagacccttaaaatcaccttgtttttggaggatgtatttttatatataaaaaagaagttaaataaaggtaatttttaaaaaataaaatcgcagtggaggcatctatggctggtctaagagtagctccatagttatgtaaatttcagttctctaaattacatatttaaggagttgttaaataactttgagaataaaaaattatgggttcttcaatagctctttagatataggttgtagctttattttgaatctatccatgtcaaaaaaagtcacgatgttcttttagggtagttgataaatggttatcaaatgtagagataaaatcagtttagataagttgtagctaaatttaggaattttatttagaaagctatcgagagcagtttttagattaactatctaaattattaatttaaagagtctttagagctactggagttgctctgaccgtccacaggagtactagttggtagtctcaagtctctcagctctcaaggcattttctttgactgtggttttcttttgttcttgcttgcttgtcaggtagcacggctgctgagacattactgtcagggtctcacggctcaaggagttacaagttcaacgccggtgctgttttcttagcagtgctcgtagccatagtagattcctaccacatctacacctggcttatttcttggcatggagaattccaagagagccgcctagataggcgtaaggtgtagtggtgtactctgtctcacgtgcgctttgcatttttagagttcaaattttgtcataaaaactacatggtaaacaagacaagcaaagcaagcaacctgtagatagccttggcaagtgcaggcattggaacagggtataccatctcgccttccatctaaatcccgatgatgagctaagtcgaaaaaccgctcaaatatcaccggaattcgtaaatcttgaacggtttttacttcaaatttaaaaaaatgaaatttgctattctcgggcggtattcgatgaatcccaagcgctttttggtgatttaccaccgataaatgctgattagttttgaaaaaaaaatatgacatactttataggatttttttcccatttttatagattttttgaaactcaaaattttaaacgaattttctgataatatcgtcggggtctattttcgtttagtaccgcacgctaatgagaaattttaatagtaaccaactgttaccgtgcgggatttgaaaccatgcattggagcagccgtgggaagtgcagcgcaggaagaaggaacaactccgatgatgagggatatttgttttttttttagttagagaatgtgtatcatggctttgttccactctagagtagatttactccaaaattcttaatgaaacagttctgctcaaaagtctagatttatttcttataatcagtgacaacatagataaatatatttatactttatatctacattgtctttaaagaatttcagagcactaaaagaactaaaagaggtactctaaaaattatactacatgttgtagtagggttcttgtttgactgtctattgtcagcttgtcttcaagttttgctctagaaatcattccaaacatccccttagttaattaattagttataaaaaacttaaaaaaatcaatgcctcatttatttgagaaatctgcaactctaaatatctttttaataaaaaattctcaactacagattcgtagacctatgtatagcatttttaccatttttaacttctctccccatctactcgtagataaccttattttaatagccataatgtctaagaacctattaccataatcagaagtgtcatgtaggaaagacaacattagttactatccatgagaaaataccactacaaagagtacctactattacaacaaactagtacaatatcagtgcattaagacgacacaattgttatattctgcacaataaacaatgcaaattgtatatacttttttgactaaaacattgagtagatggccaccttaggatcaactacttaatttgtaccaaaccaaccaattcaaaagttagctaccctaagattatctccaacagatcgtgtatataattgtgcaaaacactatttttcactaaagaatatagaccagactgttcacagagtgaaatttgaaatatgagatagaatgagagatatgatgggtaaggtttggagacaacctaagaatgatactaattatgattgatgccaaaatttgtcaagcaattgctaccatggcggtatacgtatatcaggcctgtttggttcactgcctaacttgccacactttgtaacttttctgcctaagtttagttcttcaattcgaacacctaaccttagtcaaagtgtgacgtagttagccacgaaccaaacaggtccatcatccatttgttgtcgtgatttggtatcaaagtctactgtgtgactctttcgcaagagggactatggtgaaaactagaaaaaccggtgattgcgggttagattagaaagaaatataataacttttttttttaaaaaaaaggaacgacggtggatatcagaaaagctgatgttttataggagcaaagatttctgcgtggaataatcgaccctttccattctagaaagaacatgattacagaataaatttatttatgtataaaaaaactatttactatagcaaataagcacagtactagattcattgcaaaatatatccctatagtatttctatttggagccattcatgttgttgacagtgttttagtatttctatttatagccattcattataaaaatatttatatttagaatcgtttgactttggctacagctagaatttaatctcttcggaaatgaaaggaggtggtggtagatgattaatcgaaaaaacacccaactgaattgcatctctttgggttggaaacggctgcccccgcaatccccgcagacccggcgtatggatccaaacccaactcaaccgcacgcatttctctttcgtcgcactcgcacgcacgcacgcacggcgtcccaagccaagcaaccgcccgcggccccgtgccgagtacacccgatccgatcctcctactcgcttgctgttgctaggtcatggccacgaccacgcacggcgcgcgtacgtgacgtgcatgcgctctcgccctcgaccggtcactattactgtcgccgccgtgccaccactggggtggggaggagcggagttgtggggttgcaagtgttgccgcgctgctcgtg

SEQ ID NO: 150 - DNA, 3000 bp, Zea mays
  source 1..3000: mol_type = unassigned DNA
tataaggaaattatctacaactttcttatagttgataatgactgattctaaactgaacttaagcaaacaatgcgatctctgaaatctgtacaggaattggacagattcagttactgaatttaagaaaagcataacttctaaactatcaggtttatgactatcagattttaacacaagtaaggtaataaagttatctacaaatttcttgtcaccacaaataactgatttcgacaataacttaagcaaccattgcaatctctaaaatctgttcagaaattggacaggtttagttactgaacttgtgaaaagcatagcttctaaacgatcagacttatgactgtcaaatttttacacgagcaagataataaagttatgtacaacttttctatatgacgtttctacagaaaacatattttacttgactagattacactcacaaccaaaaaagtacacgcaggaattttagtttgctagcacaagagcactcaactcaataatcaattaaaatcatggaaagacactaccatcaatttctcaagtttaaaccattatgacttagttataaagtttcaatttatattgagatacttaagcattttaaaaaacatgcacacttttgttttcttctaatttttcactaactcttcttataattatgaaatgggtgttattttagcaccatatgaaactatctaatttggggttgaaatttttacgaggcataggtaatgacaaatcatgactaatgtataaattttacatgctcagattttatattttatttaatacaaaaataacaaattattaacgcaataaagcatgtgagagcaagttaaatctaaaactaattattttgtgtggatgcatgaccatattaattttttaggctaatataatatcatgcaaggacagtggaacaccatttttcatttttacattcatatattatttataaaccatttaaaactacctaatatgcatcaaacaaggtaaatcactaacttaatcatacatgcaccaaaattcatgaaatttttaccggtcaccaagaatcacaccaagagcctactgtaaaaatttgaatccatttggatcaaaagagctatagatctaaaaataacaagcaaaacaattatcttttatatttttctcagctatagtatgacaacatctaactaacaaaacaagtttcattatttttggatttttataattaaaaatttggagagaagaaagttcatttattttgtaaactagttttaaatacgaatttctgcagaaaacctttccactaaaacatgccaacttatagatctaatagatagataatttcataaggaagggaacaaaataagtttcacaattttaggagctaccaaactcaagatatgaattatagaagatattacgaaatctggaatttgaagcaccattacccttcgccttgggcccacacgtcagcctcacaaacaccttcttcaaccttcagccaaccaacagacaatgaacagccacgaaacgcagggaaaaaaagaaagggagggaagatccctgtgcagtcggagggggagggagaggaggaggccaagggtatccatttataggcgagggagcagcaaggggcggacacaaggcagccattgcagacgcaagctctgtgtattggtgggcatgggtggctgcgaggcattgcacctttccttatggacgaagcaacgaacacacagtgggcggacgttttcgtcgttttccccttagaatcggatcaaggttactgcacaaaatatcttccttgatgtacactctacaaatcttgtaaaaggcttgaggtgattcgggcactggttagagagttatagacccacgaaaattggtttgtcagtggctcagaaatcagtggaaacttgtgaaaactgaatgtcaaagcatatcaaacggaatcggatggatgccatcttttaatatgttgtgcccctattaattattaacaacttttatatttgggaaaacttgagttgttcaacaaaaatgtgggaacacgagaagtcgacccgaacgatgttgatttcagacttagaagaattcgaattctgaaatcagatttttattctgtcttgatggcactgtttgagatacttagagattgaatcaaggcttagtttaaatataaaatttgttgtataacacaggttctacaatgtttattaaaggtcaaacctcatatcttgaatataaattaaagtttcactttggtcaaggtagcatcattataaatcttcaaattatatttttaagacaatcggggtatttctcgacattttcatggcattttctctgcatgaacccttaataacttttgttgtagagttgatatagagttgtttgagcaagatgacaaggttttgttgaatttcaaaattcgcatttgttcggacgagcatttttcagcatgtataggatttatcttttcatgtgtgtatttggttcgaacttttagaaatctttagatacacttgatagatagagatgaatgatgatatagagaaaacaagccgttttgcataagaattaattagaggttgacacaatagagattccgctggagaatgcggattcggacatagttcgactagcaaccgtagagcgtttgattaaatgagcttcagatgagaattataagtcgagaatgattttcgagtttgcgttcgtgccgataattaaaagttttaacaggctccaaaattggttgtttctcgcgatcgaataactccgaattcggtgaaatgtgaatgaatagtctggataatcagagacatacgcgagcgagaaatagaaatgttcactgagcatccgagattaggataaatatctcgacgtaacacgaactagacacctagggtgtcacacaaccctacctgaaagatgggcaagagggggcggcaatggtttggtggcagttcatgttaacatggggtggtagtcttggctaagttacctcac

SEQ ID NO: 151 - DNA, 3200 bp, Zea mays
  source 1..3200: mol_type = unassigned DNA
ttgcatgagttcaagtcggactcgtcgagtctgattaagaagtgattttgttttggatgacttggtttcaaatggcgccagcagaatctcgactacttgctccgttgaattattattcccaagtttttggagttgaatgagcagccgaagctggattggacatgcataaggccttgttcgtttctgccggattggtgggtcggaacgattcctgaccggattggttctctaatttatataaactttgattagctggaacgattccgggtgcaatccgacggaaacgaacaaggcctaaggcttgtttgctactcaatcggtaccgaattacaagttgttatgtaaataaatgcgctatttgtcaccctcatgcctcatgtgatggatccaatggtccattatttatattggtgtaatccaatcaactagacatcaaaacgaaacattttttttcccggatctgtatcatctaatgggtcggaccagtgaagcgctttttaaactgattgatgtttatactcaggcacttataagtaatttcatctaatattcatctattttaaggcattccatattacttaactcattgcatattgcttaagtcattttatctgttatcaactattttatcttattcaatcctttaattagttttttttaactaattttaagtcatttcatgtattttcagacacttaaccttactcggtgcttgttaatatcctttagttttcagctatttttgaagtcattccatgtgttttcaaatattttatattacttcatgtttgttaattgattgatgtttatacttagtcacttttaagtaattccatatgatattcagctattttaagccatttcatattattttaggtaattccttattatttaagttattttatctaattttcagctatttcatcatatttagccctttaattagttttccaactagcttgtaataatatcgtaaaagttatacatcggggataaccttttcataacggtgttgaacaccaaaagtgatggacggtctggctcaagggcccggacggtacgcgcccccacgatcagattaactcggatgattatccttatctgatgtgtggttatctatctaatcacgtggggtttgttagctatcgcctaggaacgggtccagacctccctatatatatgaacgggtacgaccgattgaaaccctcgaatacattgcaatcgaatcaattactttctttattatgtctgccttagaagtagatgtagcatagtctagttataactttccgcatatccacctcaacccctattcaactatacatcgtctagatccatcttggatgacctgctgacctcaaggcgactctaggatcttacccctcccggggggcaagatttattcatcgaattgatctcttaatttctataggactcgccgactctacgacgtctgaggatgccccaggtctagattccagcgaggaggaagacgaccctgcgccatcgtgaaacgttcgaccttgtgtgtggaccgtccggtgcgacacaagaaaggggtcgcttctgcgcccaggtcgtggaccatccggcgcgctgccgtagaggcactgtcagatggtacacctctagcgattggcgatgtgcagatcaactctaacaaaaagattttattttttaattaactctctgcaattctatagtaaatagattgtacatgtcattagagcaaccaataatatatatttgtggaattttgtagcttgcctggcactagtccatttatttatgtagttgttactttgcctctactctagcattacttcctatggttccttgcagtcgtcctgctgttatttccccaatgtatctggaaggaggttgccgacgtgattgaaggcattttttggatgtccttgcccttgcatgcagccgacgtgagaattgaatcgaagttatggtaatgttgcatgaatcaactccttttagcaccgcatgttgtcttaaataacaatgtcacatcatcctaaaactagataacaatatgtacagagttttaacccagttaaactctactatctcttatgaagctctctctatatctattctcataattgcactcccatattaccaagcatgataatatgccaccacatttaatgagtataaaactcttattgagaatatccttatatgagtgttagtaaccggtttaagacaggaaagacaacttattgagaagaactatgaaacatattaaataagggtacgatgagaaattagcatccaccttggtatattaaatactgtccaaaataactactaaaaggaattggagggagtatttgctcttaaaacaatgctcgtggtgcccttggctactcacaccggtttaacaaaactaaaatatatacaatacatttgagagtatgacaaataagcatgtacaaaaatttaaaatttaaaatatatttaatatatgtatttgtgtatagaggacgtgatttagaggacgttgtttgagaggaagaagatatatgagataaaatcttttagaggagacggtaaaagacacatatagaggatggatatagaggacgttgctggagacaactatcttcagcaacgtcctctaaatttcatctcctaaaagaatattctttgttctttacagaccactctaaaagattccgtcctttatagctttactctctccaatagcatcatctatattaaataatcaattaaaatcgatatgtcaacgtctctatattaaataatcaattaaaatcgctatgtcaacgtctcctcaacatgggccccttatttgtccagagcctacgaagagctatagaggagcctccaaatgtagaggtcgtggcaagactccgctattttacaggtccatttagcattctctgttggagccaaaaaaggtgcaagtgaaacgctatatttagggtacatgaccatttacgagttgtgaccatttacgagttgttgcttgacttctatcctaaacctagggtgttctctctcatctctattttttatactttaaactatgaattaattagagtggcagagctagagggtggttcgtttggaccaccatagccaaaaacccattaaactatatgtattaggtataaaaatattactcttaagcagtagctatgttttatttatttgatgcgtcc

SEQ ID NO: 152 - DNA, 3200 bp, Zea mays
  source 1..3200: mol_type = unassigned DNA
tgttgcgttggaaggaaccttcgtgcagtcaactgaaccgaaccgcatctgtctactctgagtgtgtttggatgaagatactagagaggttaaaatcgaattaggaggatgaaagtggatatctgaatggttaaaacaaactagtcggttgcccgtgcgttgcgacggcttacaacaatacccacgtaaactatccattaaaaaatttcaagattttttattgattgtctccgctctctgtataatatatttttttgatttggctaactgatgttattgtttactcaatgcaaatatgttttggtacaacacggccaatgaagtgagcgattataagagagttcacaatgattgactgaatgaacagagattataaaatgacataattccatcatacagagaccaaataagagaaagtttgtgagatcaagtttctaaaataagtcccatgaagtcaaacttataaaaaaagatatatcaaaatatggagtgatgctaaagtcaggcataaataaaaactggatgcgctccatataaattatgctacttcgtagcaattactaacgtttaaaaccaataaataacctttattttgctgttagtgtgacaaatcattgctgttccattcaattcagcaacctcaaacaccatgtattccattgtgccaatgtggtctcagaaacgacctaatgcttgcaagagccaagaacatcgtgtcgtgcttgggctgtagcctcggcctgacacgattattttttttattttacaaaaaaacgtatatacatacatacaatttatatttaatattaaaaacatcttagcgtgatgttctactggttagacagcttcacccaatgtctcctgcccttcttccatcaacgcatgggttcgaaccccatctcctgcaccgtttttttaatattttacgctgatttaattaaatggatcgacgggctaacggactggcccgatacagttagcaggccggcatgacgtgcctgtgccatagttgtggcccgcgtgcatctatcccgtgtcgggtgtcattacgctgatttaattaaatgaatcgacgggctaacgggctggcccgacacagttagcaggccatatagacgtgcagcggattaatttgaaatagatgtgaggggttatttgtaaaaaatgacacacgacgaccgttgaaactggtgctttaagtatagtatagatttaatattttaaaatgtgtatgtattaaatttggtaatgaatttttcttatgttataagtacattattacaaactatgaacagaattttgcataaattattttgtgtcatttgctccctacaaccaaaaacgtaaaaaaaatattgatatctatatttgattctgtatatatctattatttgagaagatatatgataaaattgaggtttttatttatctttacatgcgcagtgctaaaaaaagaatacaaatttgtattacagattttatattctaatgttcgcaatcaaaaaattggtatccgaataagtatccattttcatcctcaattagatccaatagcaaatctatctagtattgaaaatgagttgcaatataaatctattgtttggatgtaacagagggagggtcggtccaccttctactcatgacctacaacccttaggtctgtggcccactcatgacctatcgagcctaggcctgagtgcactggtcgcctataggacccgcaacacgacaagctgtgtcgagacccaggctatgtaggccaagggtcgtcatggcataaaagtggcaatgatggtgtcagagctccttgccgcccacaccgcccgtcataaagagcgtaaccaggatagcccagacgaccgagacacatacggaaaacacaactttaccaaggtagaacgtctcattttaccacggcacattagctccttccttgagaagctactggtagtcgaccctcaccttagcctataaaaagggaggaggtcagccagaacacagatacgaacacatgcatacaaacacgtcgaccacaagacgagaagatcccgaaggagtcaaggagcgaaccaccatgacgcccaaggctgagtagagagcactagtcctgtagtctttaggtctagccacacataagagacttgggagctcctctctctctcacacacccgcttgtaacccctactacgagcattgagcaacaaggtgtcgatagcgcgagccaacaaagactggatgtagagacgttcagcccaaaccagtataaatcttacgcccactgagcacaccatctggactgcagcatgccgatgtctgccacaaagaactgcatgtaattgatgtagaagtggtcttaagtgccacatgtgatgagcaaggtgatgtgccccaaaggaaatgtgaacatccctaagataatgccatagaagggcactaaacttggcttaagagtcaacttgggaagtcccatccttttgaaagtcttggcgaagaggatgttcaacaactactgccatcaataaggccttaacacaacctcacaacacctatcgttggaccaaagatgagtagcaccttaggcatggtcatggtctaggtgatcagactagtcaaaagtgatcgacacttcagatcattagaggaattctagggtcgtcggttccacgatgaacacctctctctctatgtaagcttctgcttccccttagactcataagcgtttggctcaggcctctttggcttgggttcaagcggcttgaggaccttctcggtggatccctgaagtgaaagcaatccttggtctttatggtggatatttggatgataaatgcaatgtccctccataatcttctaaaactcatcttggttatgggagaaagatcatcgctgaccctcctgcttgactaccgtcgtgaattgatgatccatcttactccttttaggtccaaattatgaggcattttggacaaagtttgagacaaacttgtaaaactttgactataaataactattttgttatttagttttgaaacctaaaaaatactttcacaaaagtataaatatattaagagttcatttgtaatttacaaaaaatattggtaaaatctatattttggagaccgtatcgttgtcttaaacgacttataacttggacctcaagagagtatgtttcttgtgtctgcctttatctggctcagttt

SEQ ID NO: 153 - DNA, 3000 bp, Zea mays
  source 1..3000: mol_type = unassigned DNA
gatgcaaggtgaataggtgattgtaccattgtgacaggggcagctaagaagaccaaatgaaccattaaagagtccaagtttcaatttattgggtagtataggaaacaacatgtctgaaacaacaactttcagtttgtgccagactcagaggagagaatgtctgaatgccatacttttctatgcgtggatacctgcacacaaatattctcactttttacatctagtagtgcacataaattctcatacttcaaaaacaatgagattatctagcaatgtcatgcaactacctaaatctaataaaatgacattcagaaagggattttgcaacctcaccttcaaggaaacttacacctttatacatacgcttatagttctgcgttgattttggcagaatatcaagtgaaaaaacagcagcggcaaagatcagattatggttcatgtcttccactaacaagcatttattatagacaaactgagaagctggtaataatgtgattatggaagttgttttcaaacaatagtatagtttgttaaatcggagtaaaatgctaactcaacagcttgatgcaaagacatgaaccattataagtatataacagtaatgacctgcaatttctggatgaatatcttatttcagcttacctatgagatcaatgggaagtccttggacacctctctgcgacattgcccttacaacaaccttcttgcaatttgaagtaaccagtggtcctgctgatgtggctttagaagagatgacacaattagttctggaacagattgcccttccaaatgtagataatgctaatgtcgacccaagcatttgcttgcaggctgggatgcaagggcgcgttgccatcatctacatatcggtcgtcgcatatgctctcatcctcctttatgtacaaaaaggagtaggactgcaaaaaatgttttggaaacaatatcatggactacacttaaggacatataatgatgtgtattgttttaaggtcaggatgtgtatttattgattgagaaggtttcactgctacagtcaagttcaggtaaacaccatgaatccaaaactaacccagggttattcacaatctcaatgagacaatgacaacttcaacctggggaatacatattacaacaagccaaacctatgtgctattttaattactacatttgtttccttaaatgaaaggtcaacattttcaatagctttggataatgcaataaaaacaatgcccctcgcgaagttactgtcacctaggagaaatagtacagttattagaaggacctaaaaacatggcttgtaaagttaattctaatatacatattcgtataatatagcctaacctttattaccaatatttatccaactataaaggtaatttccaaaatatggatagaacaaataaaagcctcgaaacttctgctaatgtcgtccttagatgggtcactgggtcagtacttttagcagtatgttttgtatggtgcagtgagatgagaaagctccaactaaagtcgcttgactcaatatccatcatggaagccattccaagcctctcccaaaggattcctcctcgcacttggtcacaagggtcaaggtcaatgaacatgtgttgcaggttcttgaatgttctaagtacaaataaacatgtgttgcaggttatgttggcaataattaggtggtgactatcttgtttacctggaattctaagtgaagcatgattctaccttaacaactaagatctcaatctatcttaatctgtccaacccaaccctaaataaaaaaaggaatcacatttcagaaaggattgacgagttacaaagcacaatgcatgttcataacctttggttatttccaaaacaaagtcttgcatatatggctagaacagtaatatggaacaacaaaaaagtaagggtgtgaacagagcatggtgccaaagaaatgaggcaatgttgtaatatcaaacaaaacaaaaaatatatttaaatgaacaaatatgatacatgaaaatttagttaagaataatcatatagttatatgtagaattattacggttactcaggatgacttcgaaagtatggggatttccaacatgttcgattgtgttgttggtcgctggcccataataactccatcgaaagcttactaaagaattcttatgcatacacatgaaactcaagaaccgtgttatgaccaaaaggttcaggcctgacaactgaagattcaaaagcaagggcacaaaaattgtgaaaagacaacatgatccttccacatcctaagataagcaaaaaaacatctctacttgggtaattgatttttcagtcggctaaaagtaatagttcgattttgccaacaagatcagctatatgcttgtagagtggaacctgcacagcaacaagtgtccaatgatccgagaataagaattatatgcggtggcatgacatatttatcaaatcatgatgattttagaagaaaagcaacaactcttttttagaagcaccagctttgcaagctatagttgacacagccagcatagcatttccaccaaggtcagcctgcatttcgcacaatatcatatctatttcatttggataaaatatatttgcccgaaataaaggaacaaaaccaagatagaaaaagtttaggcagtaccgataagtggaaacacaaattcagtgaaaagaacataattatttccacatagtcaaataaaactgaaataatcagtatcccattgcccctatattgactatacccattgtaaataatttcttgagcatattgagtcatcaattgtttgtgtacaacatgggtttgacaggaacaaaaagctacaggggagagaaaaaggaaaaggatctccgagtgttccaccttgtggcatgtcttttccaagtccatgatggcctggtcaatctatgcatgttgctgtgaatccatcccagggagcacctttgacaccttgtcattgctcacctgcaccgcgtcaatgaataccctgcaag

SEQ ID NO: 154 - DNA, 6000 bp, Zea mays
  source 1..6000: mol_type = unassigned DNA
cgcgggacgaacacgaaggccgcgggattcccacctctctcacgccggtctccggccgcctcgctccttccccccttcgcgctcgccctcgcgctcgacccatctgggctggggcacgcggcgacactcactcgtcggcccgagggacccccccggtctcgaagcgccgacaatacatgtcttaagtttttttaaattcactcctttagacacactttaagatacagcttaagatatccattgtacatgccctaaggggtgtttggtttctagtgactaatatttagtccctacattttattccatttaagttgcaaaattaccaaatatagaaactaaaactctattttagtttatatatttggcaatttatacactaaaatgaagtaaaatgataggactaaatattagtctctagaaaccaaacactaaagtgtaacaaaaaaaaacatgagttcagagctacaaggcacaagtacacgtgttagtcttaaaaaaaatatggaatctcggatcctttccggctaccctgacactaccaagattcatgaaaagtttttgccgaaattttgaaccctactactgtcacgtcagttaggacatgcataaaaccaacagccatatctagctaaccgttttgacaagtaccgaaacgtgcttgcgtgcgcgcttctttactagacagagaggctaccagcctaccacagccactttcatttcgagaccccgtaccgccatcactcgacgcgatgtgttttaaatttgcgtaaaatcttgttttatccacacaaaaaaaaaatcataccatggcgcacatgtgtgggtccgcgtctgaatttaatgtgctgccacgtacgataagacaggggttgttcttcgccaagtgcatctgaggaaggaactaatcaatatatatatagtctcgaaagccctcttgatgacagtataaattgagtgattagccaagactaggcaaacggttcacgtaaaggcctgatggagctttattacactgtgcctatatgtgtgtgtgtatgtttttttttttttttgccataagctgcacgttaggtatttgggaaattggtaaggttgctcaattatggcgtacaagctttagccctaattacgttattgtccacacgctgacgcacacgtatatgcatatatatggcactcgacgactatagtttttttttaatctttccttccagccttcaccacatgtcttgaacagaacaataccacgattcaattgcttcgtgttcctctaaccaaggcagtcccttcgaacagattgcaagcctctccacaagacctcttaccaaggaccaaatggaggcaatcatgtggccggtgaatcaaggaaaagagaagacaatgtcaaagaagagggggtgcgaggtgcctcctctggttcccccagccacacctaggctgcggtgggaaattgagcatgctgccctgttggttgtccgatgtttaggacttttccattgttcctatcacacgtggattaaatgagattggaaaaaattataagagattttgacttgttcgagatttaaaaccactcaatcccacttaatccacatggtttgagagaacaaaacaaacaagcccttaatgttacaccagctggattgttcttgttcctgtcacagtggggttatctagttatgtcattgaccgtagtgctcggtgttctagtgtctagtcggtggcttttgtatccctgccatcgagtgcctagctttgtgtttgcctgctttcagcttgttagtctggggtttgccaagtgacagtaagacacaatcctttcgtggtgggagactttgggtgccttgttacatcagatattcgtttcgatgttttccttgtgcctttctgttttcccaagtagacgtggtagttaaatgtgtttcaattgcactgtttttttcatggaacgtgaggggtttaaatgaccgtgctagtgaaggatgagatgagcaatcctctctacaagacaagagcgtccctgggtctatgcgggctgtgctaccacacaagtaccccaaaattgcagggccctaattttagtagaggttcatatatattaaatgaaaaaagtattatattccatgtattctaggccaaattatttgcggtaactaaaaagattgtgtcacgctgcatcacgactctagaatctaagtggtgtccattgctcttccaaatcctacgcgtcttacttagacctggaccaatgtcggtcagtaatatataaatatacaagcatcggttagtagtatctacgagaacatcattggagataatgctttttaaatagagaatatgtaactggtacaatttaatacatataatttgtattataacatcattgtaacatcattggagataatgctttttaaatacagaatatgtaactagtacaatttaatacatacaattgtaacatcactggagatgatcctacaatgactaggattgacagatttcttgcgacaactaagtggcatgatctcttcccctcggcggacctacaatccgtttgcaccatgacctcggaccactgcccgcttattaagcaaggtcgttcttccttttgcttcttccgtttgcaccatgatttctcgtatgcacgtaaatgcattttaatagattcatctacatatcgctttaactgatctcctcgttgatccatgaaagtcgtaagagatagatctggagtacttacagcgggaccctgcagtggaggtaggagagattccatatcgatctccccttgacggacgatcttctggtggcgatccaccgtgaagtgtgacaagtacttgtccgccgcctccttgcgccgttcggagagtttatgcagcagttccgcctcttccttgtcgcgttgttcgttccattgccgcatcacctccttctcatcgtgcattacgaggtcttcaaagggcctttggtcatcagccgggagcgcctccatggccggcttgatgatgttggtagtggagatcttggtgtgatccttagaaccggccatttatgggccgatttttagcagatctagacacctattccccagcggagtcgccaaaaagtatgttgacaccttttcggaggcgccaatcactcaaaagaaccagtggcggtactctctggtcaggcgcggacggtccgcgacctggcgcagggctcgggtcctctgcctgacgaccggacggtccgcgccctggggccggacggtccgcgcgtgcgcaggggcggcagaagatcgccggcggcgcctggatctcgctcccgggaggaacccccgtcggggaggagagatcctaggggttgtctaggctcgggccggccgacctagactcctctaatcggcgtagagtcgaagagaggcgaagaatttggggattggaatactaaactagggctaaactagaactagactagagctactcctaattgtgctgaaaataaatgcgagatagaagttgtattggttcgattgttgggggttcaatcggccgtagcccttcatctatataaagagggaggtctggatccgtttccaactgtttcccgagttaatcccgcggttttaggtaacaaatcccgcgagaaactaggaaccctaactgactctgcgcgcgcgcggaccgtctgcgccaccaccgcggacagtccggaccgcggaccgtccggcctcggggccggaccgtccgcactgctctttttagagctcaacaccacgattcaattgcttcgtgttcctctaaccaagtcagtcccttcgaacagattgcaagcctctccacaagacctcttaccaaggaccaaatggaggcaatcatgtggctggtgaatcaaggaaaagagaagacaatgtcaaagaagagggggtgcgaggtgcctcctctggttcccccagtcacctagctgcggtgggaaactgagcgtgctgccctggtggttgtccgatgcttaatgttacaccagatggattgttcttgttcctgtcacagtggggttatctagttatgtcattgaccgtagtgctcggtgttctagtgtctagtcggtggcttttgtatccctgccatcgagtgcctttgtgtttgcctgctttcagcttgttagtctggggtttgccgagtgacagcaagacacaatcctttcgtggtgggagactttgggtgccttgttacatcagatattcgttccgatgttttccttgtgcctttctgttttcccaagtagacgtggtagttaaatgtgttccaattgcactgttttttcatggaacgtgaggggtttaaatgatcgtgctagtgaagggtgagatgaacaatcctctctacaggacaagagcgtccctgggtctgtgcgggctgtgcgaccacacaagtaccccaaaattgcatggccctaattttagtagaggttcatatatattaaatggaaaaagtattatattccatgtattttaggccaaattatttgaggtaactaaaaagattgtgtcacactgcatcatgactctagaatctaagtggtgttcattgctctttcaaatcctacgtgtcttacttagacctggaccaatgttggtcagtagtatataaatatacaagcatcggttagtagtatctatgagaacatcattggagataatgcttttaaatagagaatatgtaactagtacaatttaatacatataatttgtattataacatcattggagataatgctttttaaatacagaatatgtaactagtacaatttaataaatacaattgtaacatcactggagatgatcctacaatgactaggattgacagatttcttgcgacaactaagtggcatgatctcttcccctcggcggacctacaatccgtttgcaccatgacctcggaccactgcccgctttttaagcaaggtcgttcttccttttgcttctgcaagggttttagattcgaatcgttctggaaaaaaattaatggtttcaaagaggtggtgtatcaagcttggaatactagagttaactatgcgggcgccatcctaggtcttcatgtgaagatggtctgcactgctaaatctctatgtgcttggagacgaaaaacagttggtaacgccaaggtgcaattggcaatcattcattcatattactagaacattaggcgccccttcgggcgccccactgtgtagccgagtacttctggcatccaactttctccattaccttcatttccaatgatcctcctgcaaacacctccataagcgaggccatctgacaatggtggtcaattccaaatgatccgcgcatggagcacgagacacggctcccaactttcagaatcgtttacacgagaagcaaagcacagccacaacttagagagtctgcgaaaaaacggagaaccaccatgccaaacagcgcgtccagtttgaaatcagaggggtcgcagtcaggggacggaccgggcccgaaacgacaaggctaggccattgttgatttgcctgtcacacaaaaaggaaatgcaatcagtgaacagaaaaagtgtacaagtctgaaacagcagagaggccttttttcagacatgaggaatgggatcctttgctttatgtacaatccattccctacagcaggaagtgtacaagtctgcgtttccagtaatctacaggtcatgcctacagccgcaatgggaaaaacaagctatcaagtcatccctgcaccgaagataaaaatagttatagcagcatctttcaatgaagcacttataaggaatttacttacattagatcatagcaagtttcagttcaagtgatttgtttacacgaagctaatatacaatatgcttacttaacctcattttggctctattaacaattaattagggacggaaagcgaataaaactgaagccatcacagcaactgatatgaaaacaaatattatgcattaaaaataatcaccaccatggcaaaaggagtaaact

SEQ ID NO: 155 - DNA, 5000 bp, Zea mays
  source 1..5000: mol_type = unassigned DNA
gggatgccgctcctcggcgccgcctgctgctgctgctcctccttcgcctccgtgctccgccgcagccgccaagacaacgagagagaggaataaggttgggagagtatatatagttgtttggggtagggttttagtttgcgggattcaccaatttgccctttgacgggccgtttgggcctcggccctgtagtgcggtggcaacaggcctacgttctaaaatttggcccgcccttcaccggccatcgacgagttcttttttttaaataacccttctctctccttcctttgagaatacggataggatcataggagcactgtatttatttgtctctgtgaaaaataaccatcaatctataatggactgcagtctaacatagaaagttagatgtgtgatagacaatgtcacacaagtttgatgtatcatagcaaaaatattaccttacatcttatttactaatgtcacacaagtttgatgtatcgcataaaatttttcttacatttgatgaagtgatgaacacatatcaagtgtaatgttatattttgtgtaattgtatggtcaaacaatacatttatttgattgcataggatatctattgttagttgcaggtatattcgatggctcgcacacttagttgattgtgtttctggtgattttttactgattattatttcgatgatattatcatgctagtttagagccatgatatggagtaggcataggcaccgttctcgaaaaacatgatttgttcatgtaacctttggcagagctccactccatgattctctagctccgatagtcgattctctaacagagtgataccgagtgattctctaacacaaatgaatttatttgacaaaatcgtttgacaaataggctctgaagtgattcctgataagttagagagtggggaggagggtttctttatctcactctttataaaacactagttgattgaccgtgcgttgtgacggctcacaacaatactcacgtaaaatatccaccaaaaatatatcaagatttttattgattgtctccgcataatattttttttatttgactaactgatgttgttgtttactccatccaatataacaacacgaccaatgaaaggagcgattagaagagagttcacaacgattgactaaacggatagatattatagaatggcataattccaccatacagagacaaaataagagggtttgtgatctcaagattctaaaataagtcacatgaactcaaacttataaaaaagatagatcaaaatatagagtggttgctaaagttatgcatcaataaaaactgaatgcgctccatacaagttatggtacttcgtaccaattattaacctttccatttacttttagcgtgacaaatcattgctgcttcatccaattcagcaacctcaaacatcatggagtccattgcaccaatgtggtctcagaaacggcttaatgcatgcaagagccaagaacacaagggacgaacaccctatggtaatgctcgtatggatcaccgaatcctaacacatattttacaggatccatgaaccatcatcagaagaacacaaaccatgtgcagaaaataaataaagtattatcacacccaaattatgttaagtccttagcacaacaaaaaaactaacacttaaaacaacagaggaacaacataataatttctgcaatgataaaaggatgtgtgacagatacatagaagcggtacaagcataccgagtcgacaccatggtaagggaaaaagccatgtagacacgcgatgtcgagccatcgaacgagtaccatagacagcaaatcagggaccccccatctctcgcctccatcacttccaaggttttgtagagcaggaagagaacggaagagttgggcatacctgttcgttgtcgaagaaggacacgacgaaggtctgggcatctagagacgacatagctagtatgtcgctagatacatatagggagagagcacgtaaacacagaaagtagcatagccaaagcagctccagaccgagaggcacccacatcagacgtcagtccgagaaggaaaccctaacatataaagttagatatgtgatagctaatggcacacaagtttgatgtatcacattaaaattttcttacattttatgaagacatatcgtgtgtaatgatatatttttgtgtaatcgtgtggtcaaacaatacatgtgattgcatataatatctattgttagttgcaggtatattcgatggctcgcacacttacttgattgtgtttctggtgattttttactgattattctttcgatgatattatcatgctagtttagagccatgatatggagtaggcataggcactattctcgaaaaacatgatctgttcatgtaaccttggttccgcttgtttaaagctaaataaatgacataggcaagcatcctcagggcatgtacaatgtagataccacgacacggttctcaaagtagaagatataattaagacatagttaagtacaaaggagtgtgtctaaagccttgtatcttaattaatactgcatactctttgaattaaatgatggttgatccattgtgtatatgtactatatatacacatatatgttgcatacttgacaaattttgcaatataaaatatacatatatggttgatttaacgtggaccgtactgttgccatatatgttcaactaaatcatttttgagctcgatgtgctttgagcgatccctaatctctgcatttggtccaagtacatatgcaaaacacggattaacttgattgctcactttgagtgataaggcgatagatgctccaggattctcattcaaatccaaaggtatcgtagctatttccttttcatcttcaactatcatgtaggatattactcaaatgaaaaggcagagaacctgtaggattgcttaaaagatatagtagtattttgcttagatggcaaacatgtctattcacgatacgaaattcattgttgttgcttaatcaattgcaagaacagatctacgacttaagtaattggaagaatagatatatgggatcaaagaaattagcaaagaatagattattgtgggataagaacagacctgcgggattagttgcaagcacaggcctacaggatcaaaggaacttggctgaatctaagggcttgttcgtttccgtcggattgcacccgaaattgttccagctaatcaaagtttatataaattagagaagcaatccggtcaggaatcgttccgacccaccaatccggtagaaacgaacaaggcctaagggatttttgcaggacgttacctttcaagcagatccatgaatgtgtagcttgccaaggatgatacacgtgttgggcggcgaatggacggtgggcgccgtcggtgaaggacccctgtgcgccgacgggggaggaggttcgagagggttgttgttgccaacaataaggggaggacatctagaaggaggtaagagaggggtagcggcggtcggatggagaaccggaaagggtggtggtggcggctgggtggtgaaggggagaacctgtttctttccgattcatggcaaaaacaaatcgacgggactagtgatgaaaaagtgaccgcaaaacagatgaacgggagcactcgatgccaaaaagaccaccgacgttcatacaacgcaacgacatcgtagcttcgccacgagccatgcgcgaggaacggtgcattcgtcaaggatcgagtcttcgaaaattttacacgatatattaaacagcgtagggccggaccacattttctctcaccacttttcacgtcttctctcccttggcaattttaacatatgagttaacggacaaaacacattaacctcatgactcccgccgagcacagacgcaactgcaccagcctgaatcttcagatggacgacaaaatgataaaaaaaaacttggcttcgcccgggttcgaaccggagaccttcagtgtgttagactgacgtgataaccaactacaccacgaaaccatgtttgtgtttttgttgtaccttgtactgtaatatactatatagcacttcatgctgtgtgattacataacagaaggtgatcgcagtctataaattaaagactgcaagcctatcactatcaggccgattccatgcattatttcagatgctgcgttgtaagtgtacaaatccgtgggggcgtacagattgaggagagaaaaatgtaggcaggcacacactgtaaactagctagagtgcacttcagatcattttagcagcgtatacattgggaaccctcacctgctgcttgaaaagaccagcacacagtgcacacccggatgcctgaaaagttttctagttagtttcctcgtcacgtgtaagcatgaatccatccttcattctcaacctaaaacatctctatctgactattcttggatgaagggtgttttctatcgcgactaatgaagagttcctttcagaacagaagtactgttaaaaaaaatatcggaacagttgtgtgtgtgactgtcaaaccctctgagcggtacctcatcggacccaaatagtttcggaggtgtgtcggattggtctgacgacatgtggcgatctatacaacaataatgttttacctagggttttagctatagggtcataagaccctatgaatagtcgcctcatcggaccaaggtggatgggtctaacgagtgttgtgtgcagtgaccagaaagggtccagtggacgtcagatcatacgtccaagccaatgtgttgctccccacccccacgtatgggagacctttaatctcctctaacattttaattacttcatttctttatgataataaccttttttaagtaccgtaacttgagagcaaaaatgtgtagctaacatttattcataaagaaatgaagtaataacctttatgatttatttaaacttcaaaagctattgaaaaaatgtcaataattgaatcatagtatatggagagaaactgtatagggtgaattattagagactt

SEQ ID NO: 156 - DNA, 3640 bp, Zea mays
  source 1..3640: mol_type = unassigned DNA
gatgtcttgaacatcctgctgtaggtggatttgctggagcctaatccagagcgcgatgaattcctcaatttgcatggtcattgtgattttccttcttagcggattgatccaggcgtcgcttgttagctcctgtagtaccgacatgtttttcctcctgaccagagcaaagaggtggggcgctaggttgcaaggggcttcgccgtctagccagctatcctaccagaacttagctttggcaccgttaccgacggctatggaggtggaaacttggaaaagcaagcgatcaagtttgttgcatggaacctacaggtcttgccaaggttttgagtcatccgtccactcctgccagagcgagcggagcctgagcgcgcgtccaaacatttcaaggtcgagaaccccaagtctgcccaagtctttaggtctactcaccgttggccaattaaccaggcagtggcctccacttgcattgtctccccctttccaaaggaaggaccgacgaatcttatcgatttgcttcctggcccattttgcaagggggaagatggacatgtgataggtcggcatggaggagagcaccgaggtgactagggtgagacgtcctgcccggttgaggagttgtcctttccagcccgttagccgttgtccaatcttttccactaggggttgaatatgaattttttggagaggcctagtatgcagttgaaggccaaggtagcggcaagggaacgatttgcagctacccgggaagggttggagaatgttcgtcaagtccatgttcgcacaattaatcgggtgaaccgagctcttctcaaagttaatgaccagacccgtggcagaaccgagctcttctcaaagaatttgcttgacataatcagggctcacaaacatcgcagcatgtgttacaccattggtatgtaaatagctcagatttgcaaacataggttggaatggttagacatgtgttacaagaaataaaaaatcaatgagacattgagagcgacagatttaagactcttactcattaatgcaatcacgtgatgataaaagggatttacaagctgtgagcattcagattacgacatgtgcattaaacatacacgaattctaaacaaattgaattgtaaatggcaatcttagcaggactatttctaaacaaactaaattataaacatcgttaagaagtataacatgggttacaagaaagaaaagatgcataaacttgtcctggttagaggataaaaagcaagaacaatacaccgaaacctgtaaaatttacatcatacaattttcaaacccccctaccttcccaataataagatgctttggtagtcctcgaaacatacaattcacattgaacttagacaaaaaaaatatctaatttataatggagggagtacatggctacacatggataatgtgataacggaaattgtatctgatggctgttgagcatgtttattacagctgaatttttgaactacagtcaacaatggcagttaggtagactgaacaagttcctaagtaaatctagcatgggaccaaataagtagatgatacaaattgattgtaacatactaataacaagcagtggtcaaagtggacctaaacaatcaattccctgtatattagagaagcttacttttatttggtatctgcactgctatcattgccatcatggtgcaaatacattatgtgcagtaccaatacaaatagacataaaataatttaaattgtgttaattaaaattcatagcctgcattgccattgccgtgatttaggctcttatatgttgaatacaaggtcctctttttcagtcacaggatattttgtctgtagtttcaatgatcgatctattgttcctttagttgtaatatgcaggttaggcttaatgcaaaaaactcttgctgctgatgcttcacatgtttcctctgcaatatattatgttggtgtaaatacattatgtgcagtaccaatacaaatagacataatataactaaaattcatagcttgcattgtcattgttgtgatttaggctcttctgttgatggctttcagataattgggcaacggtgtgtgtatatgttcagattcagaaagtgaggacaatatagcgtttgcagcagtggtaagttcatccttaatacccacaagcgaatacccatttgtagaatgttaaccatttagctcggaaataacaaccgaaaagcaatcaacaaggcttgcttgcgaattggcacattgtaattaacattttgcatcattccttcgtcaaaaaagaatgtgagccgtagtggttaagtggttcgatccctaaggcggcacatttttttgcttttcctccaggtcgtcgccctgtgcagggagggcctgctgatcagagatcaagagggaaagcagaagacacgttgtgccgggaggaaacacacgacgaagtagagacttagaagcaataagctaaatatttagacaactttaattcgagcactccaagaggtgtctcaaacaactggttaattcgttttatgaccaaaagaggaaaaatggccatctaatagttttgtaaaacaactccctaaagataagcacttgcttaatctccccctcaactcgccaacatgtgtgtgccttctgcgcttgctatttgcttgggtagttttgtaaaacaactccctaaagataagcacttgcataatctccccctcaactcgccaacatgtgtgccttctgcgcttgctatttgcttgggtgcccctcctctggttgtacctgcaccctcctgtccatctcgggaatatatcaaatacaaaccacgttttggtgcaaaccctgtgtaaacctactaaaaaaagtttcaaaaaattctaaaaaaaaacatgaatgtacatctcagcttacctcatctatatacaaaattttatgatcaaattcatcttactctagcagttacaaaaaagacaaattttggtgcatttgaactattaccgtttatcagaaattttgtcttttttgtaactgctaaagtaagatgaatttgaccatgaaattttgtatatggatgaggtaagctgagatgtacattcatgtctttttttagaattttttaaaactttttttagtaggtttacatagggtttgcacaaaaacttggtttgcattcgatatgtttccatccatcttctcctcctgctcgattttttttttgagtttttggaagctaccctcctatctctttccttaaaaccgcaacccctttccctccgcgccctcacttcacggctgccaagaagtcttcaacgcccgacgcgtggccgcacagggcgaggtctcgctcgatggccaggcttggccttcgtgccaccacccacccacgcttcctcaccaccgtggagatggatgtgtcgctgctgtggtggccctagcttctgcgtgggcccacgtgtagatgccgctggagaagatttattagggcgttcgatggtagcctcctcgccccagtacgctgacgtgcgcctcaacactgcccccacgtcccagcagcagcactaagggctagtttgggagccaaaaaactgaaggggttttatggctcccaaactagtcctaagacactaacgtcagcgtgttgctcccctcgtcgacc

SEQ ID NO: 157 - DNA, 5601 bp, Zea mays
  misc_difference 1315..1316: note = n is a, c, g, or t
  misc_difference 5391..5392: note = n is a, c, g, or t
  source 1..5601: mol_type = unassigned DNA
acacgtcacgtgctgactggctgtacgacgcacgcgcgcggatcaatcgcctagcgctaccagatgacatgacactggctgagctctcacggtggttgcgccgccggtaccagaatgtgaagtgtcgcggcgcgtgttttttagcgtcacgggccgtttagcacgacgccacgcacaaaaggcagttttggccgtcgaccacgcacaaaaggccgtttagtatcgtttcccgacgcgcccacgtccgaggcgatgatgccggcggcctggagcagatcacctctcgactgcggcacggcacggcggccgtacagcgttttaccggcagcggcagggcgacggttacctagctcaactggcagagaccgtgaacgcgactgcggcacgcagacacccccggcatttgcggaggaaatcgcacggcggtccggtctgtctgtttggctttggcttgcttcggttgaggggtttcgctgcccgcgcccgtgccccccggggccgtgaatgcgatggcgacggtatcggggtacctggtgagtgggcgcggcgaggacgcgtcgtcccgtgccactgccacccgtacgtactatacccgtgccatggccattggccaacggcttccttggccgcgccagcggggcgcgtgcgtgtctttgggttcgacgtctccccctcccccccgctggtccggcgtggatcgccggctgcaccggcggctcggggtcgtcaggtcaactctgagctccgaccgtttgcaatctctcactgtgccagtgccgccactgcttgttcggctcaatcatttttctgcaaggttattggtaagctctagcctggaccctggagtagtaagtaggtttaccagggttgttgcggcctcataaaaggaggagtaggccatatctatcctccacaccatactctagtctctagtggagtggtgtgcgtacgtacagtacatcctccaactagccagtcccgtagccatgtgagctttgtcgtcgtggcgcgaagcaaagcagcacccagcaggcagccgccaaacgagagtcacacgcacagctcgcggcacttaacagtgcgcgagaggacctgccgacgccaaacaagagtcgatctgacagtggcctgtgggtggatgtggacagacagacagaccaaaaggcggttcggcgtcttggaacccgcgccgcgaacacgtacgttacagacggaagcatgctccggtccggccgtccgggtccgggtccagcggtgatgttgagacagcgagtgcgaggaagaagaaacggtccggaactgcggctgggctctnntcatggatggcgcgcgccaagtttccatgcggttgttgttgttcacacgccgtcgtgatcgactcgtcgcttagtactgtcgtcggtgtcagttgcaatacaacccatgtgcagtgggacgagacggaaaaggtgtgtgcgcagcgcagtgctcaagttcagacctgagcgcttgacgctcgagtcagagagattcgggacgctctctcggtagacgactcggtgtcggtgctcagtacccaggtgacccgtgcatggcatgggagtattcggtcgtctgcctgcttgcaagacgccatccacccacccaccggcggactaggcgtttggcgccacctccttgtagttgttggcttggttaattggacgagccgggtgctcgaaggcctgcctgcctcgtcatctttttgctgcgtcatgggaattgacccgcggtgagaccaatccaatccaatgatgccgcgcgtacggagtcagagctggcacagtcgcatgtgcattgacccgacgagaagaagataatcacagatggagcggacacaaagccacagcccacagcggcacagcacgcggctcaagtcagccgttagccggtggcggtacgtgtgtgtcagtgtgggcgggcggcggcgcggtacggccgggacaagcgtaagcgccgccgccgcctgcctgccgcacacgtcgcggagcatctagctagctagctgtgcgtctctgtcaggcagcgagtcggccccgctcgccgcgtcagatcggtggacgaggacgcgtggtgcgctgccgccgcgccgttcgtcgcctgcagcaaaagctactggtgtgggcagttgggcaccgcattcatctatcacgcaccaggttctcaaatggttcgagttgagatttagggggtgtttggttttagagactaattgttagcccctccaatttattccactctagtcactaaattatcaaatatggaaactaaaatagtgttatagtttctatattttacaatttatagactaaagtgaaataaaatggagggactaaaaatgagtccctagtaaccaaacactaccttaggtggtgttacaaactgtttcacccgatgactgttaaaataaaaaaaaaatcacgcaaggaatagagtatcgtgtgattaaaagctcgagcttattttagaaggtgtgctcttatatgtttacaaatgttttgaactatatatgagtttctgctttctagattcccgagaagccacacatatctccgagggatccaattacaaacaaattcagtaaagatttctaaaaaatatcctagcgctttagtttcatttaagattgaggaataagcacacacattttctttccatagattcataatccccttcaaacaatttaaatctgttacacagatatatggctgtttttatacaagaaacattatatgtaaatgagtttaagaaacctctaactatgcttgaggacaattccctgtgtcttgctctagattacatgcgcttggtcggttgtctattgaaggaaagatgttttaatggctagacatgagagttatttgagccttggaggtagattggtgcttatcaactctagattgagtaatctaatggtttatgatatactccctccgtctcaggatataagacgtaatcactttttattcttgtcccacaatataagacgtgctctctctatgcatacgtatatcgatgcagtggtatagagacaattaaatgcattttttggtctttgaaccagatgtggttacgccttatatactgggacggagggagtattcaataaaaaatgtaccattcaacttttgcagaattagataactagttcatttagatgccatgacatccaaatgaactagttgtctggttttgcaaaagttaaatgacatttatacaattaatcctttttgatatggcgatatgccttttaccttcgacatctattggaaagatggatagtgctagaaagcgttttttttggaagagggaaatatcatttgattagatggactaagatcactaaacctagctaagaaaaaaaagattaattacatacttgtcaccctgtttttataaaattagataggtaattcattttgatgtcattgagcgacatgaaaataaactactttataactctttaaatttggagtggcatacttctaattaaccccaaaccagatatatttacttaagcagcaggtctacggtgtcggccaatgaaaaatccaccatttttttggcataatagatggtgtggctataggttactttaaagacacacttttctcattttttttaaaaaaaacgaggaccgtgattgttcagttgaagccatgaaatataaaaactagagcctcatttttaggagatggctacgtgaagatttacagagtcagcttagaagattgcaagatatcgttctaaaaaataacgatggccagttggtaattgcgagtgagataaatctggaaatttccctaagaaactgttttgtatgggcaaagttttaatataatctaaaaaggcaaaacaaccgtggagtgaaggtcttcacgtggttggtattacaagatagaagataccctcttcgttttttttatttatcacgttttagtttaaaattaaactagcagatgataaatattcaagaacgaaggtagtacttactattctctctaaagataatctctgtacgaacagtacatgaaattatgttgctgcaggcgttatggtgttattgtttcattgcaccttatttaattgaaggctgagtttgaatcttagtcgttgactctaaggttcatactaatctaatcagtagaacacacatacttttatgttttattaaataaaatctatttatataatatatagaaatagtagcagtgtattatttcatcatgacaaggccacaaaggtgaatcaagcgcctcacgtttttttaaggaatcagcaagcgcctgtgtggtaggttgcagcaagcggctgagccaaagcgggtcatgaatcactgggccgcttgtgctcggctcctctcggctttgtttcgtgggccagaagaccggaccacgggccgacagaagtgtcgcggtaccggccaggcggccagtttcgttccgtttcgtacttcggccgtggatcacgttcacctggttctgtggtcaacttctcgggtaggcatccgagtgaccgcgtcccctggagttcagctcacacggtcacacctcacaccactcaccctgatctgtggccccaaccggaaactgtcacgatcgacgcgacgcgactcgcgccgagtcggtaccacgcatcgtattcgtagagggaaaaaaaaatcaactaggagtaggagggaagccccttccctaccatgacgtctggccactgacgtgcggggtagactcagactgaccccgcacgtcagtgccccatatccctgtccatgcagctgcgccaggcggcaaaccaaccagctctcgtgcgcagaaaatcccgcgccgttccccacgcgtcaccgtggtgcgccgcccccttcctctcccgctcccctccacctcgactaccaaaacactgatccggtcgctgattcgctggtgctgctgcagtttaggctaaacaaatcacccagttgacgaagagggagctgctgccgcggtcctggcccagctcgagagaagtcttttggtcttggcctcttgctgccgctgccccccaatcggcgccgctttgcttcctggtttccgcaaggttccacacatcagcatccgagacttgggatggaaggcacggcgtcttcttggagccgcgactagggtgggaaggaaagttacttgctgccgtcttcgcggtctttgcgcaggcagggtagagccggagatcagagatcttgatgcagacaagtccttcggcgtgcagggtaaatatcgcctcctttttcttcagatatatatgcttgtcggcgaagtccttcggcgttccgatcatcaacttttcttccaatttgtagttctctctaagcggaatccttgtgttcttgagagagagacnngactcagaaaggtagcgcagaggtgagatttgtaacctgtaataagtgacttgtggcgctgaagatcgaaagtcagagaaatcttgtggatacaagctccacctccaaggaatgataatggaccctcgtcctcgtgacgatcccaacctcggtgctcgattgcccaccccaaatccacccgcacctcacatgattagcttctccctcca

SEQ ID NO: 158 - DNA, 5501 bp, Zea mays
  source 1..5501: mol_type = unassigned DNA
tgcaggaggccggaggaggtgacgacggccgcgccgctggtcgtgacgttgccgctcgcgaagccactgagcacgaactccccgggcgccgatccggatccgcctcgggcgaggaggagcaggacggcggccacccgcacggcgagagcggccgctggcatggtgtggaacgagggaggcagtgacctggactggctggcagcgatgagcggagccgcagcccgcaccgcaggtgtgcgtttgcttatctcaggtcagtgacctggactggctggctactcgttgcctgctgccggtgccggataactggtgtaaggtaatgggattggtctgctggtggcgtcgtcgtcatcgttgcggtctccatctcgatcaacctcagctggtggtccgcgtcgcgtgtggcgagacggtcgtcgaagtggacggcgccgggaccggggttggctactgctgctcgcgggtggcttgacaaggatggatggcatggtggggctactcacgacaagtctaggctggagaagtttggattggaattttagaattccaactttgtgtgcgtgtgtgtgtggatgccaactgctgagtcagcagtgttcaaacgacgaggcgctcagagcatcttcaaaagctcctcctctaaatccagtttttttttgaaaaacacaaaaaaaatgtctccaatagtttcctaaaacgctcctaactttttcatatcccttaaaactctcttatagctataaataagaggtttttttgctctccagaaataatatgccgttttaaggggaaatgattaaaatttatcttactaattatttacatgtatcttaaaattgattttgaggagtcgtttctagggatgctcttaggccaggccggtgctcactatccttagtaccgaccaggaccctacggtcgatagctgtccgtacagcctcgcgatggtcggtatccaccgaccgtcgactgccacatatctttttttaattggtctatgtcattttatgaattatgcaactttcatttttacatattacatattttatgtttgacaaattatgtagattttatttatgatttataaactatttaatttgtatttacttttatgaactatattttttaatattgcttagttatatatctagatgtaattgtattttagtaaaatgtgtttcatttcaaataagagtatgtaaaaaggttgatgtagcgctaaggtgactataggctaatagtaaaggttgtgcactattactatgaacttgcggacaatgatagatatagattgagcgatagctgatgtggcggtagatatagactagtggcattagatccgatcttatattgctagagatacacataaacctcacggtcatcggtggcaaattaagttactaccagtaaaatgccaactggagaaggtactcgttgtggtgccattcttgcgccatcctcgatgtcaaagaaataatttcttgcgttgaggatttcgacatcattactacctgctcccacaccatcccatgcggttgcatctccttcatcctctcgaccactggtcgcttcatgatggtggtgccctcttcaccgcctccccatccggccatgttcccatgccgatgctggaccgctccaccacatatccatagcctccggctatccaccgcactttaagtcggacgatggagggagcgcaacaggcgggccacaccagctatttcttttggaaaaaactactttcgggttcgagccctttggtttagcttttgatttttaggggtaaaagccaaaccaaacacaccctaaatcatttacttagtttacgatacagatggcggtgagcttatcatgttattttatggtgataaacaactatgtgtgatgatgagttgctatggaatgatataaacgattagtttatttttagtaaacgacgaagtagttggatctactggagagccagaatttattcaaacctggacaaattaaaaagattaaataatataataaaaatgatcataggaagtatttattaatcacctataaatgtgttactgatatttaacacgaggtagacttatcttcgagttttttatgctctgaaaccgccatgttatgataatattatcaagtattttaaataattttcacttagtgtatcacatcatcaagtgattgaaccattcatctgaaatcttgttgtgcattcacccttaatttagtttcattatagagaaaactctttcaaccaatgctgttgaaaatgacagtaataatgtcaatttctcccccacttagtcatcggtgaatgtgaatttttatgcattaataacttaattagtaacttagttagtaatgtagttcatagcttagttattacataactagttaagtagttagtgacctcttagttaactagtcagtagtaggtaattactttgatagttagtagttagatagctacccaattaatagcggtcactaaaacgatacttccaatagctatgctgccaacaatgatatattcttaattttaggcagacaaatacaaggttcaagtgaaaaaagatgcacttacattgttcttgttaccacactcaaactcaagcaaacctccacgtgcaaggataactagatctccacaatcacgtacacaaagagagttatcaagtcgttcgttggcaaaaaccaaacacatgattataaatgtaaccgatctgcctaaacaactttgcttatacaccaaaatcaaaattatctacctagggttgcaaatttcacataacataagctaactcaacacatataaaatgaggaagagatgaaggataccttgctttgaaaggtctaaggatcaaatccaagcttccaaggttgaatcaatagattagagaaggctggaagaattggggacagggagagggagaaagatgagaaataaatgaggttcgccccggctagtgaactgatgttgattaaattagagcatgacgtcacgagctatgacattgaggtactgccacgtcagagccacaataacgttcactctatttataacataatacctcggtgctttgacctataacgccaagccatataacctcaacaccattggtcacgacgctcacagccgagtccaaatacggtatcaatcccatcatggatgtaattgtaattttttttataaaagagaggtaaaatacaaaaaataccgagtccattattaacatgtggcaaagactctaagcagactaagttgtgtttgggcgtttctgtaaaatgcttctgctgctaaaaggcaaacaccaaccaacaaaatgacagaagcacgagaagctaccttttcacgaagtggctgcttttgtatagtatcattttcagttgttttcaccaatcaacttaagactttttgcagcacatagctcacattacccttttgacatcttatggtgtttttttcacaactcaggcttgaacaaaacatatacgctaagccgctaagggtctgtttggttcctttattttagggactaaagtttagttgagtgactaaattttagtccctaatatgtttgtttgtagggactagaagtatttagaacacattaaatgacttgtaagaagactaaaatgccctggcaaaaaggtgaaaattaatatggtttagtctcttttagtcatctcttgagggactagagactaaagcagtttagtcaccgttttagtcccaccgtttgactatttagggactaaatgagactaaaacagagggaataatctttagtccctcaaatcaaatagggcctaagttcactcagtaacaagatcagttgaccaccaagcacagaagtttctgataaagcatcaataagtggactacggcgggtccaatgacttatgacttctgaacggcggagaacttgaccagaggccacctaaggaaggccttttttttgtttatatatatagtggaagagtttctctcaattatttcagtgatacataatttatttatcttcgccatcatttctgtctttagcagatcatacaaaacactattttacacttccgctctttctcgcgaactttgtctcctctccgccggctctccctggcagaatgtgacacgagaaaaaggtgacggcgcccccaaagtcaaaggagggggcatgcgttgcgtgcatggcagtagtgtggttgccaaatttttacactttccagtcaaatagttctcagctagacgtacagttagactagatttaattactggagacttctgtggtcgcatttgcatgcatttagttctagaagcgtcaggttagctttacaaaccaaggtgtagctaggcttacagttcaaagtgagcgaagccctcgctcacttacgcggcagctgatactgaacgggagtcagtcaactgaggacgaaggccgggcaagcagagggtactgcctcgtcgtcgtcctcgtccatgtgcatcacgatctcatcaaggccagatcgaacaccgtatctatccactagctgagaatttgcacccacacccacccaccacgacgctacaccaaacaacaaccctctcttgcattgtatgcgagtcagcaggtagtagtactgcatatactgctacacgcattattcaataaaggaacccaattatctatatacatagttttgtaaataaagaaataaaacagaaacaaattcgataattaacataactcgaactgcaggccttccagggatcgatccctacaagactaacgtacgttattagaattgaaaacgcattccaaaatatggtctagcattctagcaactatatatacacgtagaccgatccaccacacccttggtatacgagagaggccgggtttcatgttgtgcgtgctgttcaaaaccttatatatgcatgtctcccgacttcactcattggcagttgggacgacgacgacgaccggccggccgtgtggtaaagcatgcaagatggtcattcaaggcaaggacccatatgatgaggaaatgagacgcagacatcagttgtcacacctcgcgatgccgtactcaggggttggaggtccggagctgaccatgctgggtagaacagtaaggttaggaaaagacactttcatgtctaggtgaatatggacaaacaagaaaagaagaccttgttgctagaaccaagagcactagcggtttctttctttctttcagacatttgatctatacggaggacaccatatggatatccatatgagtatagaggagggtgtggataagtaaaaggtgaaggaggagaagcgttggtggtatgatcatcactgagaggagtatccatggatggtcggtagggacatgtaggaggaggatacgtgtatgcaaggagaggttgtagactcaagaaatagagataagcagtgatgtataagagaaagagcatcgaagaagatctactccacattggcaagggtgttaaggtatactccctccgtttc

SEQ ID NO: 159 - DNA, 4001 bp, Zea mays
  source 1..4001: mol_type = unassigned DNA
tttgtgacagatatcacaccataaagcattaaaacagtttctagcatgatgaccttcaaccccacacttctggcagaaagcgggacgaacaggatcattctcttttttcaaagtagatggagatatgatgggattacctgattgtattccatctcctgaggaagaagacattaaaccttcatggtgatcagatttcccaagccgcggcttcaatctgcagctaagattgcggtttctgttccaggattgagaaccctgggcattttctttttgtccccaacgatcccattggggattttgagggttcttgttcttcggatccatcccgccagacaccgtagaacttcggaaaccacccgatcccaatcgtggccactcttcttcaatcaccgggggacgcaaggaggttacgcaccacccgccatggaaaccagatcgagaggagacagggagcgaccagagacgcaataggaaggcggcgcaatgagggaaagaatgagaaccaacaaaatccgggggaaaccctaacctggttttggagactgctggagagcaggaaatcgcggcagagagctgatgccgcgactcttgggcttgggctaggaagagcgacgacacccccgagcgccatccctcccatgacaaacgggagcgacatggacccggagaagcgacgcgggagggcgcgagaactccctgggccacacagcgtactgtagacgacggcccaacatcctcctcacgcacaccagctcgatttgtgccatggacgacgtaagcagagacgtgggaggaagaagatgtcccggcccaaggtatctttcgcttttttctttttcgccattccccagctcgaggtgtatctatcataggggtaggttgtcatgttgtatcgatgaacactagatttcatgacgttaggcacaacgtagtaatcgatttagtgaacaatactttataatacttcatgatatactagtgtgcccatgtgtggctataggagcgatgacacgtatgggatagtggtctttagtacgtctgctgcctgagtttacaatgtcttaggtcccgaattttaggtctgttaaccgaataaggccttaaggcttaaggtgccagagatcgaggtcatcaggatggtgaacctttggctttgccaaagccaatgcaaggtatatcaccaggagatgtgcctcgtataatttgaaggtacattcgatgatacgccctttctcagacgtcgacagcatgcatatctaactctgtatgcaaaaaaaaaagacatatgaacgaagaattcgatcagcacacgcatgtttaagcctgcaccagccagccagccagtggctcagatcttgagacgttgaatctatccagtcaaagctggatgatgcatatggatgggatttggtcgcagtacaccttgtcggccggaaggaaagctagctctgggacagcgaggaggagctagctgaggcctctatcgggcgaaaaggagacgagcactgcccttcgccgctgtcagcgcagcggtggagcacgatcgttttcgagatgagaatgagatagacgacgacaactgcatgcgttgatgtgccatccgactgtcactcgcggctaataattacatccatctctgcaccggccgggccgggccggggtggtttcagtttcatccacacaaacaaaccacacactgcagatccgccggcatgtgtagttgcattgcattgcattgcatatcaaagcttgctgaagattgattgatgctggcgtggtgtagtccatgcgttgccgacagcgtgggtcgtcgacggatcggatgatctacactgcatccactccacgcctttaatttgcggctagctccacttggcgggtccttgatttggctttagaagagtcagtgcctgtctgtgctccaactagcttattcaagcacatgaaacaaatgcgcgcggcagaaatctgtacagcggccaggctcgatctgtgtggatggatggtcgagctgattattagtgcgcgacgatgcttaacgagcaatccagatcgatctccagactggtgtcgtcgactcgtcatgctatattattggcaattggcattgtgcttttcaggaggagatcttgcattgtgaagctactatcaggctttgaccaaatgctgcaaattaagccagaggtcgttagtgatgaggcctgaggggtgcagtggtgtcactgtggcctgtcggggtagtgcagtggtgccggtccacatgtcggccgctgccgcagtctgattactatttgtcaatggccatgcatgcgcctttgttaaaaagagagagagagagagagagagagatgcgcaatctgattactatttgtcaaagtttcctccacactatttttttttacctccacaccatctctctagcacaccatgatatatacaagaattcagtcaggctgtggtatgtggagcatgcatggaaaccaaagtctcatgatgggggcgacatgattagttccaagtttagtggacaatctcccggtcaacccctggcctacactaaaaaaaaaacagaaccctgcatctagtctactagagaggaattggaataaatatttaggcctagtttggatactcttggattgaagtggtttgaagggattagagagtatttaaacccccaataagtcaaaaactctcacgatacatctcaatccgctcaattcccccttattcctagagtacccaaacaaagccttagcggcagattgcattccagccacacgtgagtcttttctctctctatatatatattaccctggccacatagtgattttctagcatgatctagtagtctaacctctgatggggacaagcatatatatgagtagtaaggtggcgcctacgccaacgctagttattaatgggatgaattcagagaatcagctagcacacgtagtagccatttcttttaattaaatgcgagaatatgtatgtaagcattattggagtaccaaattgccaagacgataatctatccatgacaggagcatcaggcaaagcacatttgggaccagggtgtgtggcagtggaagacagtaattagcgagagttaccttgttgctcttgcatccaacacccactggcttatcctagtgcgcttcgtatcaatccatcatgaaaacctagccttgacagccagggcctgccacgccataacccattaatctcataggtgcttagttaaactcataccagctacttgttttctgagcgtgctaggtgcaagccctttagtgagtacatacgcaagcatttgctctgtgtttatatgtccattttcaattgtaataccatagattctctcttttacaacttaatacttaataccaatatgtttggcaacaatacctaccttcagggccagccctagggccatgcagcggaggcgaccaccgggcgcccacaaaagaaaggggcccaatatctaatagaatagtatgattgatgttaaattattatcttactaaatcacatagaagctctaatagaatagtaggattgatgttaaattattatcttactaaatcacatagaagtggaacagacgatgcacatgtctggctaaagcgtcggttaaaggcctcctacaccgctgcacagaaccagtctcgttctcactgtcgtcgccgatcgcatgtcatacactcatagcttaattagttttatcgaaattataattattagaatggaattcaattccaacgaaacaaatgaggcttaagggaaattagtttattttcagatgaaaaacaggaacttcttagaaaaatgaggttgccaaactaacactaaatatattattattttggtcgactttatttcttgataagtatcagacatattaaattgaatatatatcagtgtatttatttatgtttttgcaagtaaaactaacacatattatttatatataaaaaaattatacaatatagaagacctat

SEQ ID NO: 160 - DNA, 4700 bp, Zea mays
  source 1..4700: mol_type = unassigned DNA
cccaatgtgctggaaagtttgaattagttcatacttatggcttaatccttgagacaaacataaggatcaaccaggtagcatgtcctcatcgatgggccagcgtcggcctccgcacggaggcgtcgtgccggactgatcgtcgttcatccgagcggactgatttatgggcatgaaagagagggcgtgaatttttccatgggataacagtactccataaccattatttcaattgtattctcataacaatatattgccttcaatcacatataattacctagttcagtgaatatcttcctgctagtctgctttgttctgtcttatagtttttcgatgtccaggagagaggagaaatggagaaaagcacagttacaagaggactgccaatcgccaaagtcgtctactgctttctaaacgatcccctatcagtgtccttccattctccaaaatggaacaaagggacgaatcatatacttaagtcccagctgaaaaggctgcagtcggtcgtagattcctcaaatgggtctcctgcagctggttttgtcgacatggcaacctcctgcctgtcgactcctggttccaagatatacacaagcgaggaccaattggataatggtaggcggtagcgaccatttgcctgacgaacccttagcggaggaaaaggagtcggagcttctcgcgttgtgagttctcaggagctgctgcccttcacatctacaaatgtgctgccatgccattggtctgaacaaggggagatgagatgcaggataacagacgtgatttggacgttgctcattcagatctctatccctccgtatttttttttatttttcgtggtttagttaaaataaactagcgagcgataaatattaaatcaataaataataaaaaaacgagcgatagacaacatagtttacttatcaacggtgggtgctacgtagattcacatcttgcctgaaatttatttgtttgggacttgtgagccgctagttactgcgggcttgatagacaacgctaaacttcagttgcatttcaggattttagttcgttgtagggagaatgagctcatgggtattgttggtcgctcgcttgctgtgtatgacatcatgacatccttatatgtccagctcagctctattactctctccaatagaacgtgtagaatagagtaaacggaactgtataagatactgtttaacattgtttgtagagagaaatttaaaattaaggataagataaataatcgatagcctaagtcaccgtcagtggaacatgtcaactgttatacgatctgaattctgataatgagatcttgatgatgggtggtaaatatagttcaatcatattacaaacgaccactatttcaagaaagaagaagatggcatccatgtgctcatagccgcatagaaagtaccttgttattttttatttatcgtgttttagtttaaaatttaactagcggacaacaaatatttgagaacaagttaatatatacaaattcaggacaagttaatatatacaaattcaggctcagccacgggcacttaacaatgaaagaacttcaacaagattatttactttctactacactcaacaacaattaataaatcattatgacttctaaatatcatttttacgttaaccactctgaacctcattgtggtgtctgaatacttaaacgagagccagagccaccacctacgagaggctggaagtagagatggcaatgggtacccgcgacccgatacccgatgggtatttactccattagagtatgtatgtgagctaaatattccacccgtgggtatgttattgggcaaaaatctttacccaatgggtaaatgggtattagaacgttccaccttcacccatacgcgttaacccgtgggtataaaatacccaatataaacttagcccaagcatgaacttggactttagtcatctatctttttactatttaacaaccttttaggccataatgtcatagaaggcttaacgacaatttaatgatcatgtaatggaacatgtaatgtgctatatagtactgtcctagtgttactattttatccaattatctttggtgtgttgaatggatggttaaatgatgctataaattctgtaatggatttagatggatatacttgacatttgtgtaatataatattttgatagatgtttaatttttgtgggtacgggtgacccgatgggtgactcatacccacgtgggtacgggtatgggggtaaatccatacccaccagcgtaaatgggtgacccgatggggttatttttttgtcgtgagtatgggtatggggcagtaatacctggtgggtatttacccagggaacgtatctggtgctcaaaggggtacgatgctcatgtgcacattttaaatctggtgcatccatttcgcatctaacagcagcaccaattttgtgaagaacccttccaccttcctcccctggtgggaggggttcttcgtaaaattgctggtgtcgttgaatgcaagatagatgcaccagatttaaaatgtgcacatgagcaccgtacctctttgagcaccagatacgttcccatttacccattgccatctctagctggaagcaacggtgccgccggagatggagacggaaaaggaggcggcagcggcgaggcaggcgaaggagtccctggagctggcgttccagatgtcccagatcctcgaaaccggcctcgaccgccacactatgtcgctgctcatggcgctctgcgaccgcggcgccaaccccgaggccctggccgccctcgtccgcgagctctcctccgctgctcccccaaccgccgccgaggctccctcccccgtgagcaacgccgccgcggggccggccccggcaacagcgtccatgttctcctccggccttcgccgtccctagggtttgtgatgtcccttttttcgccggtgagactgcttgccagttagtcgactagatcccgcagtatgcactcagccgctgtgagtgcctgaatgtagtatgttcttatgttttgactaaatttgtgcctcacaagaagataatggttcaaccaaatgccatatatcacgttactgcgtagttgtgctgctacctgcatttggcatcaagattcacattataatgtctatgtttgtgttataccattaatttgcagccaggtgttttgtacaaatagtcaatctaggcatgggcatatgaactgtgggttggttattctttctatgcaacatcaacggttgtggaactttctatctcttgttctctctggctctgccacccttttagctacaccttgtcgggtagtggtgttgccatgatatagatttgttgcagttactagtagattaatgggatgcttgttgcttggttgacgaatgggttagtacatcatattcccactcctaacttttttgtttgatttgtggaatggaacggattgatccatcaccacatcattccttataagctaataattagtataaccgcatgccactaaaattcatgggatgaacacatcatggaccacctcgcctctgtccccctccccccgactttagtgtacataggatttgtggcatccctttcttccccagtgagattgcttatcattagtcaaagtgtcaaactagatcccgcaatatacatttagctgctgtggatgactgaatgtagtgtttccttctgttgattaattttgcatcttggcttatgattcacacttcacaagcagataatacatggacttgtgtagttcctagatgagttgggtcaaacacaatgtgcataggttacatgactgcaaacatgtgacgcctcctgcatttggcatcaagattcagagtacaatctcttcttgggtcacacaattaatttgcaatctggcatttctacaaataaagaatctaggtatgggcatgtgaactgtggggttggttattgtttctatgaaatgggaatagttatggtagtatgtatctcttgttctatatggctgtaccttcttgactagtggtattgccatggtataggtgtgttgcagcaaactattagattaattgttcatgtgctttggttgagaatgtcagcacatcaagtgttctgtcacaaatcaagttttttgctgtagtagactgcagacaagtgactcagtcgagtctagagtgacacaagtttctcaattgtcctcagaacagttgatcagatatagaggtgataatccatgaacaatcgattgatacgatttgaatattactgtctttttgtgtgtttatatggcagcagatctacctgacctgcaccttatgtagcaagaatttcttattgattgcacctgtagatttgatacttttgtgtttgttgggacatagataatcaagcaatgcaccggtttctttgtctccttcctggtgctgtgtagctctcacagtctattggatttcaagtttattggttcttgtattctgatgaatgtttaattataggtctgatgcccgttcccttccgttacaattccaaactgtaagtcgttctgcctttttaagatacatagctgttgttatgtttgtagacacagtgtgtacctatgtacatagcaaatgctatgtatctagaaaagccagaatggcatacaatgatacaatttggaacgaacggagggagtagcgtaatcctagattcatatctcaagagca

SEQ ID NO: 161 - DNA, 9501 bp, Zea mays
  misc_difference 1465: note = n is a, c, g, or t
  misc_difference 1467..1468: note = n is a, c, g, or t
  misc_difference 1570: note = n is a, c, g, or t
  source 1..9501: mol_type = unassigned DNA
ggtattaatcgattaggatcgccgttacttctcggatatgaagactggatcgctgcccttcatcgtagataacaagcgaaacaaaaatttgattttaaaagaaagttagtgtaggataagtgaatgctctagattaggtaaatctagattcaggaaaagtatttaacttgtgatgtaaaactttggcataaggatccactactagtaagcttttctgcaaaaatgagtgtttgaaatttgataagctttaccttgattcccgacaaaccaacatatccttgagagtcttttctttagtcgggtaagtcttgctgagtaattccatactcagggttttattccctgttgtttttcaggttgtaattttgttctgttgtggatggtgctaagtgccggtgggctcggccttcttatataagtatatcccttctatagtttctttaatgaggattgtcacttaagctagcatgtattttcaaatttacgaatactttataacatttcaaattgtaattcttttgaatcactttcttttgtaatcttttgtaatcactccgatgaggtataataatatcttgataaacttgtaatcattttgtaataaaaaatttatttccgctgcaagtgtttgtatgtgagttgtgtttatttaatcctgcgatcttggcggtaagtggtttatccggggtccttgggacactcggacagatcctgttaagttgtttggtgcacatgcatacccgtttgaggtccttgggacaaggacagatgcatgtgggcccaataacttgggaggttctgccacataaatattcactgattttgcaggatatacaggtgcatacccggcataccctgtgtgttcgccactggaagcgggtgctctcaaagttggacacaaattatcgacaaagttcttcccaatattatatggaggcctcagggaggctcataagccattgtttggcagaaccaatcaaggcatcatgtaagtagtttgccatcacccttccatccccgcacaatggtgaggatggcagtgacaaagatctgtaataactcggtgggattgatagtcccatcatacttctttcaaaggttgggtgaaattctatagacatggtgcctattagaacactagggtgagcgtcatatagccagcaccggtgggatggaccacctaaccaacatggcctataggtggcgccgactccatagagttgaaaggacctagatagctagatggagtgaacggtcaataaaaatattacataaaccatataatatcaggtagagccaacatatatgaacatggggaaacttctaggttatttctttagtcaaacttggagcttgtgtgaaagatatgtatgaggaaaagggcgaattccagcacactggcggccgttactagtggatccgagctcggtaccaagcttgatgcatagcttgagtattctatagngnnacctaaatagcttggcgtaatcatggtcatagctgtttcctgtgtgaaattgttatccgctcacaattccacacaacatacgagccggaagcataaagtgtnacgtccccgttgtggcgagtctaaactaggtgattcacgcactatctgacattacaaacagaacacataaagggcactacaagaatcaagctagggatacactcctacaagccattattccactatagttgctatttgtgaatctcccacaaggaatgagcacaagagtccctcgcaagaatgatcaagtcgacaacaaacaacaaagtcgctcaacgatatcatgcttccttcaagctatctaggtgacaacaaccaccaagattaacaagaatattgtagttcaatatgatcactagtgccactagatataacaactcaatgcaaattattagagatcactctcaaagtcactttggatgaaacactatcactagtggtgagtgcgagatgttttcttaggcttactaggttgtatttcaagttgggaaaccagaatatccacccccaaacctgaccaagctctatttataaggaatatatattgtgcacaagaccaccattgtgcacatatgcacaaactcaatctgaaccctttgtttaatgatctttggttgacatgaaaacatcttccgcactctccttccctaacctagctacatatgtgcaaaaacaaaacatgctcgatcgaagattgttagatgaagggtccagattgagtttgtgcacatgtgcacgaaggtggtcttctgcacagatatgttgccctatttataaggtcccagggggaaactagccattgaacttttactatgttgattttagggttgttggacgatctaatacccaccaacggaccatgtcgctaggttccgacgactttagaacatgccacatattagctatttcaatgttactattgtcgcactgatgattgctatagtatatcgttcgacaccctctatctgagaaccatagaaccaaagtatctagagtctgatgcccttcgtaaaaagaccagagatctaccgataatgtctgaataatatgatgtacgtttttagaccaattcataggatatgatggtcatgttcccattcaactagtatgcctaatagtgggtacattcaatgtatagtgcactcattcgattcgatgcacatgtttttcaattgtcaaactaattcttcagggtccaatgctctattaaaaatgaattgagagcatttgtgtcatggtttttataggtaccctatacatgaggtacccactcttgctaggtcaagataagaccccaatgaatgccattaagggttcatgggtggccagcccaacacgggggtaaggcctactgtatgaagtcatggcctagcctggactcatttcctgggctagaccgccaccaccacaagcacccataaagggaggaatcaacaacttcagctatatatatggattcttgcgagtggaacccggacctcctcatcggacccctttgagaaaggggtacagagggtctccacttccatgggaagaagacactctctggttgtagcactgaacctccgggatggttcccgacccattatatgccatccggacctcaagccaagtggggtctggtgccgccacgtgtctcgatcgatgcagttggatccaggccccctcgggcacggtccggggccctagccagagagggcctgggaatagagatggcaatgggcacccgaaacccgaaacccgatgggtttttaccccattagggtacgggtttgggtcaattttcatacccatgggtttgttaatggacataaatgtatacccgacgggtttatgggtacgggtttgttcctatagtacccaaacccgtgaacccgtgggtcttttaaacccgaccaaacctagtgcatattgtcattttattttataaacgaacaacaaacttgttatctacctatttacttcctaatttttatcaaatagtgaatgtataagtagttggtgagagtgttgcttgcttgctattatagttattactagtgttatatatgtggtggatgtataacctagtgcaaggtaacttgattatacaacttattatttgtatttaatattctctattaatattttcataccaaatcatgaactcattgttcattacataaattttggaccatgatctcattaatcattacgatacttattgattataaaaagaataagcatattggagataaaacccgcgggtaacccgtgggtacccgctaacccgatgggtacgggtttgggcaaaatttcaaacccgtcatgggtacgagttttttaatgggcgtaaatatttttcacgggtacgggtttgggatagcaaaacccgacgggtttgtacccgttgccatctctacctgggaatgttttgttcccacatattcctgggtctgccccctagtccaatatagaggtccagtgccgacgcgtggccaaatatgtcttgcgtaagccaccagacagtgcctgatgtatgcctctgacatggggcccactagcattaggtacggataggatgcatacttaccctcgccagtggcatgtagcatatcccctgcattaaatacgcgcgacatgccaagcctgcaacttgtgaattttactgttacccgaatgttaccaaggcaagactattgacccaatgtgccgcttaggcgcctttatttatgacttcattgctccttgtgcgttaccgaggaatgaagagacaggtggaggagatgggacaaaccatccacccctacgcacggtagagtttcagactatgccacaacctactccattagttacgcctcgactttgattagaagggacgagaggataggatatcaagagcgagcacaacgaccaaaaggagatacacacttaggaagatctagtgtcactagacttatccgacacctcttgtcctactttgtaaatttctcctgggcccacctgtcgggaccgtatctcccatgtaacgtgtccccctttggactataaaaatggggtggcatttgcgacacagagtggaggtcaattcacactcagaccggtgatttataagctttcaaccaataaaacccatagtcgatgtagggtattacgcaccagtagcctgaaccactctaaactcttgtgttctcgtgttcatgcattaaactagacaaatcccgacatccactatgagtttaatgcatagttgatcgccaatggtgggtgcgctctgccacctagccagagggttttttgcctccaacatttggcgcatcaggtagggaaggctccagagcctggcccttgattgatatgacactataatcaccttccggcaagctcggccaaggcaagctcatcgatttttggcgcaagatggagaagcgatgcctcaagtgctcgccattgatcttaggtgacgctttaacaagcgtgttgttgctaacaagagacaggtgacagaggcctcacctacggcgcttgaggttgcctccgctagcaccctggtaggctccgttgcgcctgaggtcgccaccatcgacctccaggtctcacccatggcgtttgaggttgcctccatcagaaccctaccagttccaatgtgcctgaggtcaccaccatctacctccagccgcacatagtggtgttcgaggttgctgttgtcttccaacaaccaaacacatgtgaggttgaccccaccggtcagccactatgttccatggtacatggagccgtcactcccaatcctaggggtgacttctcccacctgctaatagcttttaggaagccatgacagccacctttgtaaacatggcttccttcatggaatccattggtagggtgtcatgggccacgctagaggttgcatggcttgctgtgccggcctacgccctcaccctctagcagaagaagcggtcctcgtcgtcggccatcaaccaagcctcatggcatgctcaggctccaaccgcactagtggagcctagcaaacaagccagtaaggtttacaccttcatcaaactcatcgtggcgaaggtggtccaccaactgtggtgagcactcccactcaccaggggcctcacaaaggcgaggccaagacctgcgttggctcgcagcagagtcaccgccttcaaccaaactctatttgtgacctctccagtggcatccgtcagtcgagatggtcccccctaggggcccaccactcgtataaatggtgtttcaagggcaggacaatgccatgacctatgtggtccactgcgtcggcctactacttggacccgcatcaccaaggcccagctcgtcggacccatggtgtttggggtagccatcgtcggctcccaacattctatgcctacgacaatcatcaacccaacacaagcaattgcttacccttcgaggctgaaggatagcatcatcttgacaaagcaaaagggagtggggccaacaacgattacaacgacatcaagattgccacgacaaaatcattccgtcggccatggagaccttcatagggacattccacacacttcgaaagggttcaatactagcaccaagaaccaactcgtttgccacaagctccatggcatttagggtagcagccaacgaccttcaccgacctttgcctttggccatcaccaaggcagaaagggacactacttactctttgagtcagacgcacaacagagctcaggcggtttaggttggcctcgttccttccatctgtaaggtagcatgagaataagctattcctttgtaataggatagcttttctctatggtccaacctggtaagtctcgcccacataaacccggcctttggctccacctgtggtctagtctggtgtgggccacccttataaacccggtctctggcattcattacacataacttttataccaagttatgaaagaagaacatgttctcatccatcagtttcttttcctttttacaaatcatgtacccctatggatctaagcttctgttgtaatcctgaaaactaggttacgtagcttcccttgcacctagtttgaggcccccgcttgatgatgaatgaagaatggattgctaagggcttggctaagggaggagtccacattcttcagggtggtccaaagctgggtagccacttagtgtggtcccataccataagcctacaccttccacctctccagaatagttgacttagtaccttctggactaagtacatagggatctagactccattcagattcaaggggccggctccaaagctaggatcgacaaggtgaggccgcatgattcagaggattgagtacaacaaagtaaaggccctaagggaacactacttagcatcaatcctataccacattcaggatcgacctctggtttgatggtagcctagagcaaccgaagctactagatctccagggagaataagtcagctacatcgattggaggcactaaggcaagaagcaatctggtaggggtctggccctataaacctagtctgctaatatatgacccaaagtttggtaaggttgctcgcgtaaacccaatctcttttgccttttgtagtcgagcccggtaagagaagcccctataaacccggtccctcacaatctctacgcaaggtctcacatatccagcaatgaggaaaggtgcgtagtcttggtgaatcagctctgtcatcatacccttagccgagatatgtttgtccttctaccccctattgagattctcagctttgttgttatcatgaaatatggattatataactggcattgtcgcttagtttatctccccacttaatactgaacaaggcataggctgacaacacacatgttctaaaggaaaagtccacattctaagggtggccttgagctggtagctacttagcatggtcccataccgtaagcctacaccttccatcgcccgagaatagatatcttagtactttacagaccaggtacctaaatgcctacaccacgttcaagattaagggccagatctcataagctctgctcgacaaaagcccagtcgcacaattcgatggattgagtacaacaaagtaaggaccccaagattatgctactagacactattcatgaaccatactcgggggtagctcactggtctaaaggtaaccccacatctgggacaaccttcagggagcccttgtggtaggggccaggaaagagaaactcttgacttcataccaaactggataaaactcgagagcaagaccattctttgtcttatgcaacaacagcagtatgccgacaagcaacccacatagcatggaggcagtaagtataatgttgttgcacaagactaacatttctagaacaaggcacatatatggccccacctacgggttcattgcctcacccgaggtgagtccaagggcctatgtcgataccgtaaacatggggtacccactccagctaggtccaaataagacaccaatggctgccattaagggatcactggtggccaacccaacaaggggttaaggcctaccatatgaagtcatggcccatcctgggcttgcttcctaggcaggatagccaccactacaagcacacataaagggaggaatcagcaacttcagctatacacctgggttcctgggcgtggaacctggacctcctcgtgggcccatcgggcccctagagaaaggggtttggaggggctccacgtccttgggaagaagacactctttggctgcaacaccgaacctccgtgatggttccgagcctagtatatgccatccagacctcaagccaagtggggtccagtgatgccacatgtccggacccagtgcgactagggcctatgccccttagacacggtttgggacccagtcagagagggcctgggaatgtcgtgtccccacatattcccagtcttgtccctagtccaagatagaggttcggtgtcgacgcatggccagccactcctgacgctagccactggacggtgcctaaaagtatgcctctgacatggggcccaccaacattaggtacggatgggatgcatacatacccgcgccagcggcaggtagcgtatcccccacattaaatacatgtctcgtgccagacatgcaacatgcgaattttaatgttacccacacattaccaagacaagactattgacccaatgcgctagttaggcgcctttctttattacttcatttttccttgtgcgttatcgaggcatgaagagacaggtggaggagacgggacgacatcatccaccctacgcaccgcaacgtatcagcctacaccacatcctactccatgggctatgcctaagccctgattagacgagacgagacgataggatattgggagccagcacaacgatcaagagaagatacacgcttaggaagatctagcaccaccaggcttatccaatgcctcttgtcctactttgtaaattgctcttgggcccacctatcaggccccaactcccttgaaacatgtcccccttggactataaaaggggtggcccttgcgacgcaaagtggaggtcgattcacactcagatcaatgatttacaagctttcagccaatacaactcatagtggacgtagggtattatgctccagtggtctaaaccactctaaacccttgtgttctcgtgttcattcgtcaagctaggcaaatccaaccgtccccgccaatggggaaggggcaggtgcgcgcgctccaccacctggcctgaggtttttttcgtttccaataattttgttcctatgtcaagtattgtaggtattatttcgatggttttgcttcaacaagctttgagataaggtttagactagattagggaagtcccctatgtctagtatggtcctgaagtatctattgcttgctcttgagagtgttacaagggagagcgtgaggttctcttgctggtgtgggaagaatgtaagggatgctaattggatgaaaattagattataagtctacttgttagttggcttggat

SEQ ID NO: 162 - DNA, 4701 bp, Zea mays
  source 1..4701: mol_type = unassigned DNA
atccttctctgccatataatgacatctttggcatgacgagcagcaaacggcgtgtgtttcgcgagaaagaagacgatcgatcacgtgtgcaattgcgccacgctagacaacagaaacggttcggcatgcacacgtgagctggcacgaacgtacttggacggacgacagcccagggaaaccgtgcacgttatcaacgagtcgagtgtagtggccgctggatattcttgttttattcctgggaccacctaacagaggctcaccacggcccactgctttgttttatcctgctaggttgtccaggccgaccaccgggggtgctgggctattcggatgataacttacacgctgggcccatagcgccacgcccaacggcaaacgagccagcccatagtatcagcagcagtccagcagaatccaaccagcgaccccctattattagaagatacaaaaagagtatcagcatttcagtacagctaaggatagaaatgggccgactctggcctggctttggaggcggcggcggcctcatgctccccaagtcaattttggggtcccattttacaaaaaaaaaagagttttggcctcatgcttataatcagttttggtaaatcatagttatcaatctcgttcatcaattaaaatcagcgacaaagagtatatatgttctatatgaccatatatacctttgtatgcgtgatagacaatgaccttttttaatagaatcgatagagcccagcacaccagtttagttcatgaattaaaatttgataccagatgttaagaaaccctataaaaggttacgtcggctagtatcaaacatatgcctgagtcactctacctttctatataataaatttatgcccttataatgataacgagaagaaaatgagaaaaaagaataaaatatttcttgtttaccgataaggggaaaaaatagtctttgacatgtcttcattattgacggaacattcaaaagccggatcgacatcaagaaatgtttggttccagccaactaaattttagtttatcacatcaaacgtatattcgaataataattacagatattaaatgcagtctaattataaaactaactatacaaataaaaactaaaagacaagcctaatcaagccattatttaatattcataattattttaaatacttgatgtgacagttcggaacgaaacatctccttactggctaacaaataacaaccaacccaccataaaagagcatccacgcgtaaagatgcacggatcgggagcagctagcgcggggaagctttgcttggcgacgcatcgggactcagaaaatgggatctgggtcggcatatgctccagctctacgacgatccttcgtactagcaatcgtcgtcgccggtaacaaacatctccagacactagggatctgatcggaagggggaaactgtaataaaaaggatttaaaaaacgctactggaccccttacacgactgtaccgaagttattggtcgcgtacaaaaatatcccgacaagaaagagcatcgcaatcaggcgtctgcgtgtgccgatgggtctgcagcaacgatcgggccccgcctcgtgactggccaatcaggcatcaatggtcgatcgtctaaactggggaatctcacgccttcattatatttcaaaggaaggccatataaaaagcaattttcctagtacgcccatttccaaattgtaacaggatttaattttagtttttattacatactatctctgagaagaatacatacttttaatatcaaattgatttataaaacaatccctatgtgcactatagatagaccgtacgtagcaaataaaagcatatccacgtgaaacacgccgaccaaaaaattacgaggagaaattcctcgcatcatctcacagcaaggatcactcgagactactttgtcgttaaattccgtagatgtcatagtacaaaccaactcggcaatcggtcgtgtgactgctcccaaaaactagatctatctcaatgtgtgctacctctttagtagagcaagattttggagacactgctctccctatcgtcatcatcatgccgatgttagaggtggaagcatcaaagggcgcgcgacatcgagagctctctcgagattggttgtttcttgtaattttagagaaaatgaactttctattatataggggggacaacctttgtgattacccattacctttcattataggactaaacttcccatgatttattgactcatacacgaatggatatttgagatttattctatgaattacttggaggaatgtgggggccaaagaccagataatttcaacaattaatcctccaccaaatctcgaaagcaacacttaatcggctctcaagaagtcctcaagtaccgtttggcatatcaactttatgatggagactgtttatctttcatgagctttttagagaatttccacaactcacagatcacgaccaacgtcaactcataccctgcaggacgatatctcatatatataagccccaaacacattaagacaaaaaccattctaccttatagaccatagagtattacatcttcactagatagtgtaacataatgtgtactcttgttgcatatacaagtttttctagagtcccaactcattggatctcctatcataacgtttggtttgctaccgtgcgtaatccaggtgggtctcaaactcatctccttaatgcattatctatcatgttttgagataaacctttcgtaaatggatctgctagatttttatccatgtttacataattaggaactgtcaatccagaggtcatgcaacatcgatgagtctattgagattgattatttctcgtacattttggggagaatgccatcttattatatctaggaatatgctctcgtgattactgaaatgttttggtggttagatgctcaccacatattgttttggttgatataagctaagtgtcaagagatgcaaatggaaaaagtaaggtatgattctagccttagtaaattgttttttatactaacattattctactaagtgcaaagaaccttgtcaaatcgagagaaatcggattggagaagtttggctaagtccagccaaacttgcaccagctcgcggtgcaccggactgtgtctggtgcccaggccggcgctccggtgaactagccgatctcgggaaaatctgagggcgccgcggctataattcaccggactgtccggtgagccaaccgcgcccacgccaacggtcggccgcacgattagcgggcgacacgtgggcttcgccaacggtcaccaagtcgcaccagactgaccggtatgccacgggggccggtggctgcaacggtcaacttcgtcagaaaaggaaggaaatcacgcactgttcactgtctggtgcgcccatagacaccaggcaactaaagccttccaaataaagttcaaacggatcctagctaccttggggctataaaaggggcccataggcgcatggagcagtacaccaagcacccattaacattctaagacgccaagacttcgcatacacgtatttggttcatcatgatagtgaatcgagcacttctttgagttgtgactctgatgtgctgcttttgtgtgctcgttcttgtcttgtgtgcgtgttgttgctacactctcgctcttgtgtgttttgctattcctcccttactcttgtgctcattcgagatcatttgtgtaaggtgtgagagactccgaagtgtggagattcctcacaacggtatattattgagacaaagagaatcgtggtattcaagttgatttttggatcacttgaaaggggtcgagtgcaaccctcgtctattgggacaccacaacgtggagtagccaactattctacttaatcgaaccacaagataaaatcgttgtgtcaattgtctttctgagcaagtagatccaacgggggagtgcagagagtgtttgcaaagttccacggggaatggcaatggctctgttaatctggcctctcaagggcactgtacgggggtatttataggcacccgagtgaccaccgtcctctcgtaaggacgtttatgccctcgggtacccggactatccccaaaatattctcgcaaaagggatgttacataccgtcattacaggaaaggctattacagacgcgacccgtaatgtgcttacccacgcggggcccgttacagtgggccaaatcccacatgggcctccggacgcgatgaggacgtgggactagcagatttcgatggagctttgccttcgtcttgcaatggagaggacgacgccctcggctcgctcaggcgtggtcttcgctggtgtagcgaagcgacgaaggcatcgagcgaagggtagcgtcttcgccttcgtcccaacagagagaaaattgaggaacatatgaggctcggaggcttgtgcaatagaatggatggttcagattgaggggagacagaaccacagaggcaggctactccttacagtcttaatatagtagtaaatattatacaaatctattaattatctaaaacgaattttaatttaatataaaagaattactccatatcttagataatgtttttcatcggttacattcgaaaatgcgcagtgccagtgagataagattatagaccaacacttgcaacataaatactcgagacaaacccacaattagataaatatctatattattcaatgcccatcgga

SEQ ID NO: 163 - DNA, 4301 bp, Zea mays
  source 1..4301: mol_type = unassigned DNA
caagggcacatttccctttcaatgctgaccaaaatagtgaattccatagctaattgtaccatgcaagtagcgcataacccactcaagtgcatgtcaatgatcagtcccggggtttgacatgaacctgctcaatttgctcacagcaaacgagatatcgggtcttttgcactagcaagatatatgagtgaacagataatatgagaattatctcaattggtctaaaccagttctcttgttttttcgcattgtcacactaggatcataagatgttggagaaggtttgcaattaatgaagctaattggcttcaaaaacctttccaacatactgagactgtgagggagtaattgcaccatctgccttaatcagcttgatgtttagaatcacaccagcttctcctagatttttcatatcaaacctctttggtagaaaagacttgaattcattgatcacatcaatgtttgtgccaaatatcaatatatcatcaacatataggcataatataactccttcgcccccaccatagtgataatacacacacctgtctgcctcatcaatatggtaaagcctacatatgctagtgtcgtgtcaaacttctaatgccacactactttggttcttgcttcagaccatataaagattttaataacttggacaccttggtctcttagccctttctacaaatccatcataagcattgtatgacacttgcctagtaattgatgccattgtgtaccaagggccacaacacatcaacactcatcacaaagaagcaaatcagtcataacacaaagacaaacaacacaagcatactacaacaaacatcgcatttctataagttccttttaattagatggtggtctttcttgaaaagggaataactactctccaaggtcgttgaaagacgaggagaagaacaagacgtatgggaaaggagcatgagcacaacaaaggatgtagttgaagcaagacttgcaaagcggcaaaggagggaacaaccatggacgggataggtaaaacaacactctcaaactgaagtgggagagagaaggctttaaaatgcaggtacaagataagcatcaatgtaaatatcaagagatgacaagggttaaaggtaatagcagataaacacacgacaaaggatgcagttgagacaaaacttgcaaggcgacaaaaggggaaagcaatcaagggatagataggtaaaacaccactctcgaactgggttggaaagaggaggctctaaagggtaagttcaaactaagcatctaggtaaatacataaatatcacaagggtcaaaggcaatgatagacaagggtgtaagagaaaagataaaggcacagaagaaccaagggtacaagtacaacaaaaaatggagttaagacaaggcttgcacatggcaaagaagaggatacaaccaagggtgagataagtaaaacaccattctcaaatcgagatgggagagaggagatttttaaatagcaggcatattgttgtcaagtactcgggaaccaggtacccaaaatagaccattcaaaaacgaccaaatccactgaccaactctgtgaggcggaccggatgaccaactctcggaccagatgaccaactctccgatgatgaccaactctccaatgatgaccgactctctagtgatgaccaactatcggatgatgaccaactttgccgaccaactctgcgagacagaccgaatgaccaactattcgatgatgaccaactctctggctatgaccaactctctgatgatgaccaactttctagtgatgaccaactccgccgaccaactctacgagacagaccgaatgaccaactcttcgatgatgaccaactctcatatgatgaccaactcttcgatgatgaccaactctctggtgatgaccaactcttcgatgatgaccaattctcggatgatgaccaactctgacgaccaactctccaccaatcagcttcggtcgaccaatcctccgtcgagcaacctagtgaggcagcgatctaagtccagcgctactgatccatgtcagctatgatgggacatcggaaggacgggataacacgctatatcgagcgtgcgcctgcacgagctggcaggtggcgaagggcccatgacgacaggagaagccacgccccatacgacaacactttgatattgattcgtggaacccattatgaagacgtcagcgatggactcgctacaagagccaaagcagcgggaaaggacgacgtcgagccaggagtacggctacgcatgaccctacgaaggacccaccacgccaacccggggagtagatctatctccctatctctttctttctctctccagtagaatacaagtcccactgtaaggttctacacttgagatacaaaaggacagggccccctccttcttcctacacaaacacaccagttgtaacacgctccacagcaatactatgattagcactacactagactagggcgcaagcctaaactaatataatcccccgtttcagatccatcgttgagtcctagcgattcaccattcagagtgagtccgcactagcatcccccaccgaaaaaaaatcttattgccccctggattccgaaaccacgacactatgctacacgaaacatacccaagaaagacataatcactatcattggtccaagcttgcactttttattaatcggcacattgactttcgccatgcactcccaagtgcgcaagtatgaaagtgatggttttcttccaacccacttctcataagaggtttttatcttctttgctcataggaattctattcagaacatgacacaaagtcatactgcctcccccaccataccttagataaaccacatgtgtctaacatgacatttaccaagtcagacaacgtacaattttcctctcagcaatcccgtttgattcagatgaataggaaagtgtcctctcatgaataatgtcatgttctgcacaaaaagcatcataactttgattcggatgaataggaaagtattcaccgccgaggaggatcctctgtggtcggacatctctcgagtcgattacctaggtgaacatgtagcatcaaaattttaaacatgtaaattttagttaaaatactaacaaagactaggaaattatcaactcaccgtccatgcttctttccaccaccaccgacatgcattgccaccggatcaattggtccatgccgccaatcgacgtcgtcgctatatggtgtcacatcatctcctacccttatttctcctacaattaagaaaacaaatttagaattggatgtttcaagactaactctaaattgtaaataactattcaatcattcagacatctgctgactgcaaaggaccttaatctatgtcgggtctgatcccctatgaccctggatgtattgtcaataggagatggatcaacaccaacttcaactttatgtatatagcaattagtaacagaaaagggaaaatatgttcttgaaacggtatttgacatatctcgctataagtcgacacatacgaatgtacctatcaccgccaaacgtatactcctaacccttattagcgaagctactcttcttcgtggacttctcttgaaattcttgagaataccataatcgacaaatggtccaaggacaatcttctagccacgagagttgtacatgcacatatgttgatgtatcaaaataatagtaatacattaatatttaatttcttgataaaacaattgcactagtgataattgcaagggcacaataacctaaagtaagcagatcaatgaaaatcctagatatgacatagaattattgtttgaactagcataatgtttcgtgaatttgtattatccccattgtagtgttacttataccataacaagagtggaatactatagaaccgtaccagacaaccgagcgggcgaagtagtggccagggatggggatgatggtggcaccggggagccaagaccgggacactaactaggaaatgcgggtgtcacatgcgcgagtgcagggcgttgtgggcgcgtgcgtcgctcgtgtaggcggcgcgagagaggcggtgcaggcatggcgcgactgtggactgagggcgacgatggagtgtggcggcgttcaggatcggtgcaagaaaacacgataaaagtgaaggacgacgattgtaggaggaagaaagttgagccacctctaaaaacacttaattttcgacgggctctggttgccatcgaaaataaactcataatttttagcagtttataatcagtcgtaaaaaatagcaacattattttcgacggataagtgacaa

SEQ ID NO: 164 - DNA, 2901 bp, Zea mays
  source 1..2901: mol_type = unassigned DNA
aagactactaatcctgagaattgaacctagatcgtaaatgcagttaagagacaatgtatggagaatcgtatagagacatgctcttcccgaagagtctgtctctagtattttttaattagcactttagagactcctgaatataccccatattaaatgaggtcacgtacaaccccagttcgtttttcgagatgactaagagaacatatggtacaactctgagaacatggatcattaatgtagctaagagacaacgtgaagagacaatatcttcgcgaagagcacatctcttatattttttcacttagttcaatagagacctctcaatagaccacatgttaaatagggttgtacatatcctaatagacatttcacagaacatttctttagcgcctgcagtgttagtgtaaaggataatcactcgaaccagctcctagtgaatgctcaatggcctaacagagataggataacacctagttggattatatcacatttagacatgtaaaccttattatcagtgcccaacactaatggttacactaccgaaatcacgttctaagacactcggcaaacactattttatagttataaaatggtactatccaacaattagttgccatccctaaacaccgcatgatgagcaacagggcggctgccggctggccaacaacacttgtgggtccgcgtcacgtgggactcgagtgggcgctggtggtaccgttgggccggcaccgtgtgcttttggtggtaggaacgcacactgccctattgggctggagtgggccgcatccaaattgattcggtcttcttgttggaaggaaaggccgcaaagttcttaaaatcatcttgtttttggagggtgtatttttatataaaaaaagaagttaaataaaggtaattttaaaaaaaataaatcgcagtggaggcatctatggctggtctaagagcagctccatagttatgtaaattttagttctctaaatcacatatttaaagagtgctctaaatcacatattttaaataactttgagagtaaaaaaattatgggttcttcaatacaggttgtagctttattttgaatctatccatgtcaaagaaaagccacaatgtttttttaggggagttaataaatggttatcaaacgtagagagctaaatttaggaagtttatttagaaagctattggagagcaatttttagattaactatctaaattattaatttaaagagtcttttagggctactggtgttgctctgaccgtccgcaggagtactagttggtagtctcaagtctctcagctctcaaagcattttctttgctgtggttttcttttgttcttgcttgcttgtcaggtagcacggctgctgagacattactgtcagggtctcacggctcaaggagtaccaagttcaacgccggtgctgttttcttagcagtgctcatagccatagtagattcctaccacgcctacacctggcttatttctttggcatggagaattccaagaccaagagagccgcctagataggcgtaaagtgtagtggtgtactctgtctcacgtgcgctttgcatttttagagttcaaattttgtcataaaaactacatggtaaatatgttattctcgccaaatcccggtgatgagcgaagtcgaaaaaccgctcaaacatcaccggaattcgtaaatcttgaacggtttttacttcaaatttaaaaaatgaaatttgctattctcgagcggtattcgatgaagtcccaagcgtttttcttttgtgatttaccaccaaaaaatgctgattagttttgaaaaataaaataaaatatgatttataggattttttccattttttatagatattatgaaactcaaatttttaaacaaattttctgaaagtatcatcggggtctatttttgtctagtaccgctaataacaaattttactagtaactaattgttaccgtgcgggatttgaaaccatgcattggagcaggcgagcagccattggaagtgcagcccaggaagaaggaacaactccgacgacgagggatatttgtttttttagttagagaatgtgtattatggctttgttccactctagagtagagttactctaaaattctcaatggagcagttctgctccgaagtcaagatttatttcttgtaatcattgacaacatagataaatatctttatactttatatctacaatgtttttaaagaatttcatagcaccaaaagaggtactctaaaaattatactacaggttgtcataggattcttgtttgactgtctttatagatgtccaataagcacgaggcccgcgagcccggcacgaagcccgttgtttgggcccggtccgagcccggcacggcccggttctatgcgggcccgggccggcccggcacgaataagcgggccgggctcggacaagaaactaggcacggtgggctagcccggcacggcccgtttagctctaagcccgttaagcccgtttttttatactaaaacgtgcttaccggcccgcatagcccggttttcggcccggttttttcgggctaaacgggccggcccggcccgtttaggcccgctgcgggccgggctcggacaggaaattgagcccgcgtgcctagacggcccggcccggttttctaaccgtgcctggcgggccgggcccaaaacgggccgggcttcaccgggcccgggccggaccgggccgggcggcccatttggacaactctaactgtctttagtcagcttgtcttgaggttttgttctagaaatcattccaaacatccccttagttaattaattaattagaaaaactaaaaaaaatcaatgcctcatttatttgagaaatctgcaactctaaatatcttttattctttttaataaaaaatttctcaac

SEQ ID NO: 165 - DNA, 4301 bp, Zea mays
  source 1..4301: mol_type = unassigned DNA
aatcaatcacaatcaacatgactaagacaacagcatagcagttacttgtttcagtcataactcacaagatatttatccaaaaatagtgatcaaatactttttgaaaagcataataaacactctacaactttggtattgtaatctcaaggtgattagacacttaggttgaatagtgacaaacgacaactctgttcagatttaaacagattcagggttgcgactacaaaaattcataactagagactcagacatccaattcatttgatattagactttctggaagtataattaaattatctacaaatcatttataaacaactcaggttgatttaaagtgtatcaaggttaaaatacactaggaaggttttgttgtctagatttggacagattcagacttcacacttcaaacgcctataacttaatcttcagaccaccaaaaagggtgatccaagactttttggaaagcttagaaaacttactacataacttttataatcaccaagaagtgattctatgtttaaccaaatcaaacaatatagttttcgaaatatgttctgacagtggacagaatacaacaatcctcttataaaattcataactctcaaactattaggtttattgtcatgaaaatttaacacaagtaatataaggaaattatctacaacttttttatagttgataaggactgattctaaactgaacttaagcaaacaatgcgatctctgaaatctgtacaggaattggacagattcagttactgaatttaataaaagcataacttctaaactatcaggtttatgactatcagattttaacacaagtaaggtaataaagttatctacaactttcttgtgaccacaaataactgatttcgacaataacttaagcaaccattgcaatctctaaaatttgttcagaaattggacaggtttagttactgaacttgtgaaaagcatagcttctaaacgatcagacttatgactgtcaaatttttacacgagcaagataataaagttatgtacaacttttctatatgacgtttctacagaaaacatattttacttgactagattacactcacaaccaaaactgtacacgcaggaattttagtttgctagcacaagagcactcaactcaataatcaattaaaattatggaaagacactaccatcaatttctcaagtttaaaccattatgacttagttataaagtttcaatttatattgagatacttaagcatttcaaaaaacatgcacgcttttgttttcttctaatttttcactaactcttcttataattatgaaatgggtgttattttagcaccatatgaaactatctaatttggggttgaaatttttatgaggcataggtaatgacaaatcatgactaatgtataaattttacatgctcagattttatattttatttaatacaaaaataacaaattattaacgcaataaagcatgtgagagcaagttaaatccaaaactaattattttgtgtggatgcatgaccatattaattttttaggctaatataatatcatgcaaggacagtggaacaccatttttcatttttacattcatatattatttataaaccatttaaaactacctaatatgcatcaaacaaggtaaatcactaacttaatcatacatgcaccaaaattcatgaaatttttaccggtcaccaagaatcacaccaagagcctactgtaaaaatttgaatccatttggatcaaaagagctatagatctaaaaataacaagcaaaacaattatcttttatatttttctcagctatagtatgacaacatctaactaacaaaataagtttcattaattttggatttttataattaaaaatttggagagaagaaagttcatttattttgtaaactagttttaaatacgaatttctgcagaaaatctttccactaaaacatgccaacttatagatctaatagatagataatttcataaggaagggaacaaaataagtttcacaattttaggagctaccaaactcaagatatgaattatagaagatattacgaaatctggaatttgaagcaccattacccttcgccttgggcccacacgtcagcctcacaaacaccttcttcaaccttcagccaaccaacagccaatgaacagccacgaaacgcaggggaaaaaagaaagggagggaagatccctgtgcggtcggagggggagggagaggaggaggaggccaagggtatccatttataggcgagggagcagcaaggggcggacacaaggcagccattgcagacgcaagctctgtgtattggtgggcatgggtggctgcgaggcattgcacctttccttatggacgaagcaacgaacacacagtgggcggacgttttcgtcgtttcccccttagaatcggatcaaggttactgcacaaaatatcttccttgatgtacactctacaaatcttgtaaaaggcttgaggtgattcgggcactggttagagagttatagacccacgaaaattggtttgtcagtggctcagaaatcagtggaaacttgtgaaaactgaatgtcaaagcatgtcaaacggaatcggatgaatgccatcttttaatatgttgtgcccctattaattattaacaacttttatatttgggaaaacttgagttgttcaacaaaaatgtgggaacacgagaagtcgacccgaacgatgctgatttcaaacttagaagaattcgaattctgaaattagatttttattctgtcttgatggcactgtttgagatacttagagattgaatcaaggcttagtttaaatataaaatttgttgtataacacaggttctacaatttttattaaaggtgaaacctcatatcttgaatataaattaaagtttcactttggtcaagttagcatcattataaatcttcaaattatatttttaagacaatcggggtatttctcgacattttcatggcattttctctgcatgaacccttaataacttttgttgtagagttgatatagagttgtttgagcaagatgacaaggttttgttgaatttcaaaattcgcatttgttcggacgagcatttttcagcatgtataggatttatcttttcatgtgtgtatttggttcgaacttttagaaatctttagatacacttgatagatagagatgaatgatgatatagagaaaacaagccgatttgcataagaattaattagaggttgacacaatagagattccgctggagaatgcggattcggacatagttcgactagcaactgtagagcgtttgattaaatgagcttcagatgcgaattataagttgagaatgatttttgagtttgcgttcgcgccgataattaaaagttttaacaggctccaaaattggttgtttctcacgatcgaataactccgaattcggtgaaatgtgaatgaatagtctggataatcagagacatacgcgagcgagaaatagaaatgttcactgagcatccgagattaggataaatatctcgacgtaacacgaactagacacctagggtgtcacacaaccctacctgaaagatgggcaagagggggcggcaatggtttggtggcagttcatgttaacatggggtggtagtcttggctaagttacctcacccagagggccatcaatactgacgtggaaaccttagcgggtggctttgtactaaggatattttgtgaaagcctcataatggatccctagtcattcacctcggtagtgtttactggtccgatcaacccaggctagatgggatacatggcttgtgggtaaagttgtaccacctctgcagagtgtaaaattgatatgtgagccgtgctcacggttaagagcaacctagaccctcatatgataattgaacttaaagatggacaataaatcgagatctgaggatctaccaatggtttgcttaagtggtttcacttaaatgcttttgatatactcttataactttgttcaattgggatacttgggatacacacttattagtaagacaagtgttgctaataaaatattaaccaactaaaatgcttaccgcttatccatagcctaccttattatcttgcattaattttcccccacttgctgagccccgaccataagtgagctcacccttgctaatattttgatcagagggtgatgctgaagacttcgctgatgacgatgatgagttttaagtctaatgttagggcgaaggcgaagacgctacccttcgctcgatgccttcgccgatctcgccacaccaatggaggcgaagcgaccggcagttt

SEQ ID NO: 166 - DNA, 4501 bp, Zea mays
  source 1..4501: mol_type = unassigned DNA
aggaggccccctcccctgccggcagctgagggggtttcatggctgccttgccaacagaccaaagaaaattctacagcactggatggacgagactgagctgcgtgcagagaaatgggagtagattcatcacaaggcctcgcggtgtggggtaatttataggcggagtgaggggcaaaaagggaattcccctgccagctggtgcgcccgggatcgggttccaaagggcaaaagagcatgcgaagcgaagtggacacccgcggccagctgtccccaacaaagcgcaaagcggtgtcgtttggttggatggtttggtttggtccgagagctaaagattactttatttattttagctttatttagtttctctgtgagactaaaatatgggctaaactgtttgtctgtagtttcttaatgggtaactaaaataaacttaactatataaattctattttttatcatttctttatttcagttacactaatgtcggaaaaatattaaagagtattttggttctcttataatttatttaatgcgttttaaatacttttattccttagaaataaatagggtagtgactaccctagctaaaaggaaccaaactagcccttagttggggtgcattgtcgtcattatcatggcgttgattaaatgtgagatttagaataatggtgatcaaacggcctttggtgacaggctgcccaaccaagcctagaaaaatcttgcatgagttcaagtcggactcgtcgagtctgattaagaagtgattttgttttggatgacttggtttcaaatggcgccagcagaatctcgactacttgctccgttgaattattattcccaagtttttggagttgaatgagcagccgaagctggattggacatgcataaggccttgttcgtttctgccggattggtgggtcggaacgattcctgaccggattggttctctaatttatataaactttgattagctggaacgattccgggtgcaatccgacggaaacgaacaaggcctaaggcttgtttgctactcaatcggtaccgaattacaagttgttatgtaaataaatgcgctatttgtcaccctcatgcctcatgtgatggatccaatggtccattatttatattggtgtaatccaatcaactagacatcaaaacgaaacattttttttcccggatctgtatcatctaatgggtcggaccagtgaagcgctttttaaactgattgatgtttatactcaggcacttataagtaatttcatctaatattcatctattttaaggcattccatattacttaactcattgcatattgcttaagtcattttatctgttatcaactattttatcttattcaatcctttaattagttttttttaactaattttaagtcatttcatgtattttcagacacttaaccttactcggtgcttgttaatatcctttagttttcagctatttttgaagtcattccatgtgttttcaaatattttatattacttcatgtttgttaattgattgatgtttatacttagtcacttttaagtaattccatatgatattcagctattttaagccatttcatattattttaggtaattccttattatttaagttattttatctaattttcagctatttcatcatatttagccctttaattagttttccaactagcttgtaataatatcgtaaaagttatacatcggggataaccttttcataacggtgttgaacaccaaaagtgatggacggtctggctcaagggcccggacggtacgcgcccccacgatcagattaactcggatgattatccttatctgatgtgtggttatctatctaatcacgtggggtttgttagctatcgcctaggaacgggtccagacctccctatatatatgaacgggtacgaccgattgaaaccctcgaatacattgcaatcgaatcaattactttctttattatgtctgccttagaagtagatgtagcatagtctagttataactttccgcatatccacctcaacccctattcaactatacatcgtctagatccatcttggatgacctgctgacctcaaggcgactctaggatcttacccctcccggggggcaagatttattcatcgaattgatctcttaatttctataggactcgccgactctacgacgtctgaggatgccccaggtctagattccagcgaggaggaagacgaccctgcgccatcgtgaaacgttcgaccttgtgtgtggaccgtccggtgcgacacaagaaaggggtcgcttctgcgcccaggtcgtggaccatccggcgcgctgccgtagaggcactgtcagatggtacacctctagcgattggcgatgtgcagatcaactctaacaaaaagattttattttttaattaactctctgcaattctatagtaaatagattgtacatgtcattagagcaaccaataatatatatttgtggaattttgtagcttgcctggcactagtccatttatttatgtagttgttactttgcctctactctagcattacttcctatggttccttgcagtcgtcctgctgttatttccccaatgtatctggaaggaggttgccgacgtgattgaaggcattttttggatgtccttgcccttgcatgcagccgacgtgagaattgaatcgaagttatggtaatgttgcatgaatcaactccttttagcaccgcatgttgtcttaaataacaatgtcacatcatcctaaaactagataacaatatgtacagagttttaacccagttaaactctactatctcttatgaagctctctctatatctattctcataattgcactcccatattaccaagcatgataatatgccaccacatttaatgagtataaaactcttattgagaatatccttatatgagtgttagtaaccggtttaagacaggaaagacaacttattgagaagaactatgaaacatattaaataagggtacgatgagaaattagcatccaccttggtatattaaatactgtccaaaataactactaaaaggaattggagggagtatttgctcttaaaacaatgctcgtggtgcccttggctactcacaccggtttaacaaaactaaaatatatacaatacatttgagagtatgacaaataagcatgtacaaaaatttaaaatttaaaatatatttaatatatgtatttgtgtatagaggacgtgatttagaggacgttgtttgagaggaagaagatatatgagataaaatcttttagaggagacggtaaaagacacatatagaggatggatatagaggacgttgctggagacaactatcttcagcaacgtcctctaaatttcatctcctaaaagaatattctttgttctttacagaccactctaaaagattccgtcctttatagctttactctctccaatagcatcatctatattaaataatcaattaaaatcgatatgtcaacgtctctatattaaataatcaattaaaatcgctatgtcaacgtctcctcaacatgggccccttatttgtccagagcctacgaagagctatagaggagcctccaaatgtagaggtcgtggcaagactccgctattttacaggtccatttagcattctctgttggagccaaaaaaggtgcaagtgaaacgctatatttagggtacatgaccatttacgagttgtgaccatttacgagttgttgcttgacttctatcctaaacctagggtgttctctctcatctctattttttatactttaaactatgaattaattagagtggcagagctagagggtggttcgtttggaccaccatagccaaaaacccattaaactatatgtattaggtataaaaatattactcttaagcagtagctatgttttatttatttgatgcgtccatgacgacgataaacgcaacgcgacaacatgtgaagttgggctcctagaacaagcgtgtgcgatggcgctccaagcagatctagcatgactaccaccgtacgtgttccaggctcagtacaacatgttgcacgctcgccgtctgtgacaattcgtttaggtagaagaaggttgtgctcaccatacaggtaccataaatctaatcgaaaacacccgatcgatcaatttccatatatttatacttgcgttcgcagtacatacaactatattatattttctaagttttttatacttttttgtttttaagatgttagatgacattttatactgtttaatttttaaaatgttaattatatgacttttttatttgaccatagtatatttggtcttttttattacatgtctattgtctattgtcgtatttatattgtgaaaaaactaaactagaccatttatcattaaaatcttagctacgtcattgattaaacataatattaatatgtaagtaccattttagactatgacaagtatattgtaaaagatttaatttaaaatatattacgaatatgtgtattatgtgtagg

SEQ ID NO: 167 - DNA, 4601 bp, Zea mays
  source 1..4601: mol_type = unassigned DNA
ttgtatggaagctcagcttgtatgaccctgtatgcatggcgtgtggcatcagaaacatatataatgctatgtatggatgctatttcagatggctcatatgtaacctgtatgcatggcgctgtatggatgctatttcagatggctcatttgaagttatgtgcttctagttctttatctgtacatctatgtgaacatgtactccattttccatcattgattcacaaatttctgaacctagatgcgttgaagttggagtttggaccttcaaatgaagagaagtaggggggttttgcattttgtaatctaacctggcagtccacgtcagcctggccgagggaggcgggggaggtttggacctaaatgtgagcctaagacaagtttatgtatgcgcctatgtattttacgagttccgggacctggatgagaactcgtgacgagttcgatgaccgccactgaaatttactctttgcaaaattctcctggccggctggccctccctcttttattcgttcttcaacaataacaatcggtgagtggcaggcagggcgattgattctctcaacaccaagcagcaccgttgccttggatagccagccagaggcccgcaagatccgcgtcccccacccgaccacccccacacccgagcagcgcgggcggccatggcgttctgggagggctggtgcggcggcaagggcgacggctgctgtgacgactgcagctggacgcagctcgccatctgggccgccgccatcgtcgtcgtgggaggcctcatcaccgtcctggtgctcgccttcggcgtggtgttcccgcccaaggccacggccgacgacgccgtgctgcagcggttcgcgctggcgcccgccgacccggcgtccaactccaccatctccttcaacgtcaccgccacggtgtcgctccggaaccccaacatgtaccgggccatcgagtacggcgcgctcgccgtgaccttctctttcaacggcacccgcttcgacgactccgcgtccgtgccggggttcaagcacaaggcgcggaagacggcgacgctgagcgtgagagtcggcggcgtgggcaagcccatcaagctgaccaggcccggggtgggcgagttccgggcggagaacgacacgggcagcttcggcgtggagatgcggctggacacggtgctccagtacaagggccggtccgccaagtgcccgctcgtcgtcgtctgcccgctccagctgcagctcgtcgaccccgacgtcgccgccaccgcgttccagcggaccaagtgcaccatcctccgggccaagaagtccgggtgctagctgattcagctccggctccattggtggcctggctagctccgttgggtggcttttgtttctttctttctttccttcctgtgtaattaactgattgtttctcaagacaggagatactgattgtttctccaagacaggagatttgttcctcttcttgcttctctttttccaagagattgatagctgttgtagtgttgtgtacttgtgtgtgctttgaagagtatttgtaggagtggagaagttcaattggatgtgcagaaatttctggaaatttgcaacgatggatacgctgtcagttgtctgtgatcctcttcctaagcgattgtggttgtgatctggccaatacttgttgagctccagtccagctgggtgctgttgcgttggaaggaaccttgggaagcaggaggcattgacttggcgaccggatgagcagacttcgtgcmgwcaastgawctgaaccryatckctgagygcgtttggatgaagatactagagaggttaaaawmgaatkagayctaagaaggatgaaagtggatatctgaatggttaaaataaatttaatattttaaaatgtgtatgtattaaatttggtaatgaatttttcttatgttataagtacattattacaaactatgaacagaattttgcataaattattttgtgtcatttgctccctacaaccaaaaaggtaaaagaaaaatattggtatctatatctgattytgtatatatctattatttgaraagatatatgataaaattgaggtttttatttatctttacatgcgcagtgctaaaaataagaatacaaatttgtattacagattttatattctaatgttcacaatcaaaaaattggtgtccgaataagtatccatttccatccctaattagatccaataacaaatctatctagtattgaaaatgagttgcaatctattgtttggatgtaacagagggagggtcggtccaccttctactcatgacctacaacccctaggtctgtggctcactcatgacctatcgagcctaggcctgagtgcactggtcgcctacaggacccgcaacatgacaagttgtgtcgaaacccaggctatgcaagccaagggtcgacatggcaaaaaagtggcaatgatggtgtcagagctccttgccgcccacaccgctcgtcataaagagcgtgacaaggacagcccagacgaccgagacacatacggaaaacacaactttaccaaggtagaacgtctcattttaccacggcacagtagctccttccttgagaagctactggtagccgaccctcaccttagcctataaaaagggaggaggtcagccagaacacagatacgaacacaggcatacaaacacgtcgaccacaagacgataagatcccgaaggaccacgcaaccggagtcaaggagcgaaccaccatgacgcccaaggctgagtagagagcaccagtcctatagtctttaggtctagccacacataagagacttgggagctcctctctctcgctcacccgcttgtaacccctattacgagcattgagcaacaaggtgtcgatagcgcgagccaacaaagactggatgtagggacgttctgtcytaraccagtataaatcttacgcccactgagcacaccatccggactgcaacatgtcgatgtctgccacaaagaactgcatgtaattgatgtagaagtggtcttaagtgccacatgcgatgagcaaggtgatgtgccccaaaggaaatgtgaacatccctaagataatgccatagaagggcactgaacttggcttaagagtcaacttgggaagtcccatccttttgaaagtcttggcgaagaggatgttcaacaactactgccatcaataaggccttaacacaacctcacaacacctatcattggaccaaagatgagtgagtagcaccttaggcatggtcatggtctaggtgatcagactagtcaaaattgatcgacacttcagatcattagaggaattctagggtcgtcggttccacgatgaacacctctctctctctatgtaagcttctgcttccccttagactcataagtgtttggctcaggcttgggttcaagtgccttgaggaccttctcggtggatccctgaagtgaaagcaatccttggtcttatggtgggtatttggatgataaatgcaatgtccctccataatcttctaaaactcatcttggttatgggagaaagatcatcgctgaccctcctgcttaactatcgtcgtgaattgatgatccatcttactccttttaggtccaaattatgaggcattttggacaaagtttgagacaaacttgtaaaactttgattataaataactattttgttatttagttttgaaactaaaaaatactttcacaaaagtataaatgtattaagagttcatttgtaatttacaaaaaatattggtcaaatctatattttggagaacgtatcgttatcttaaacgacttataatttagacctcgagagagtatgtttcttgtgtctgcctttatctagctcagttttctaatctttattctctttgtcccttcgagacgaggacatgtgtcaaaggatttccttgctcatggcgtacttgttgacaatttggaatagaggggcaaggatggtcaaagccttacgcacaagcttctgagatagttcatgcttcttgaggcctttgcagaaaacataaatggttcgtcattaggcatattggagatgtcatactttatgtcatgtcacctcttaatgtaactttgtagtgaatcctcctccttttgaatgacttgctcgaggttatactgagttctctcttggttgcaggtcatgctaaagttgctaatgaaatagcgagttaattctctccataagtcgatggagtttgctaggagaccaaacaaccacttcctcactaggttaccaaggcacatgggcaattagttggccatgatagaagactctcctcctatagcgatgatagacaattggtaaactctgagccaatcagttggttttatgcggccaccatagaacttgaccgatgtcagcttgaagtttttttggccagttgacctgctcaagtggctcgtgaatgccttaacaatggttgccctgaggcctttaggagtcacctcccacttgactcggtcattattcgagccttcacactcacaatcatgtctcttagcttcacgatgctcccattcctagtcttggtgcctaacattaatgcgattgcaaaggccttgttgtcgaaaatgtttatct

SEQ ID NO: 168 - DNA, 3149 bp, Zea mays
  misc_difference 2972: note = n is a, c, g, or t
  misc_difference 3072: note = n is a, c, g, or t
  source 1..3149: mol_type = unassigned DNA
tttgtgccagactcagaggagagaatgtctaaatgccatacttttctatgtgtggatacctgcacacaaatattctcactttttacatctagtagtgcacataaattcccatacttcaaaaacaatgagattatctagcaatgtcatgcaaccacctgaatataataaaatgacattcagaaagggattttgcaacctcaccttcaaggaaacttacacctttatacatacgcttatagttctgcattgattttggcagaatatcaagagaaaaaacagcagcgacaaagatcagataagtcttccactaacaagcatttattatagacaaactgagaagctggtaaaaatgtgattatggaagttgttttcaaacaatagtatagtttgttaaatcggagtaaaatgctaactcagcaacttgatgcaaagacatgaaccattataagtatgtaacagtaatgacctgcaatttctggatgaatatcttattttagcttacctatgagatcaatgggaagtccttgggcacctctctgcgacattgcccttacaacaaccttcttgcaatttgaagtaaccagtggtcctgctgatgtggctttagaagaaatggcacgattagttctggaacagattgcccttccaaatgtagatagtgctaatgtcgacccaagcatttgcccgcaggctgggatgcaagggcgcgttgccatcatctacatatcgrtcgtcgcatatgctctcatcctcctttatgtacaaaaaggagtagggctgcaaaaaatgttttggaaacaatatcatggactacacttaaggacatataatgatgtgtattgttttaaggtcaggatgtgtatttattgattgaaaagttttcactgctacagtcaagttcaggtaaacaccatgaatccaaaactaacccagggttattcacaatctcaatgagacaatgacaacttcaacctagggaatacatattacagcaagccagacctatgtgctattttaattactgcagttgtttccttaaatgaaaggtcaacattttcaatagctttgaataatgcaataaaaacaatgccccccgcgaagttactgtcacctaggagaaatagtacaattattagaaggacctaaaaacatggcttgtaaagttaattctaatatacatattcgtataatataacctaacctttattaccaatatttatccaactgtaaaggtaattttcaaaacatggatagaacaaataaaagcctcgaaacttatgctaatgttgtccttagatgggtcactgggtcagtacttttagcagtatgttttgtatggtgcagtgagatgagaaagctccaactaaagtcgcttgactcaatatccatcatggaagccattccaatcctctcccaaaggattcctcctcgcacttggtcacaagggtcaaggtcaatgaacatgtgttgcaggttcttgaatgttctaagtacaaataaacatgtgttgcaggttctgttggcaataattaggtggtgaatatcttgtttacctggaattctaagtgaagcatgcttctaccttaacaactaagatctcaatctatcttaatctgtccaacccaaccctaaaaaaaaggaatcacatttcagaaaggattgacgagttacaaagcacaatgcaggtccataacctttggttatttccaaaacaaagtcttgcatatatggctagaacagtaatatggaacaacaaaaaagtaagggtgtgaacagagcatggtgccaaagaaatgaggcaatgttgtaatatcaaacagaacaaaaaatatacttaaatgaacaaatatggtacgtgaaaatttagttaagaataatcatataattatatgtagaattattacggttactcaggatgacttcgaaagtatggggatttccaacatgttcgattgtgttgttggtcgctggcccataataactccatcgaaagcttactaaagaattcttatgcatacacatgaaactcaagaatcgtgttatgaccaaaaggttcaggcctgacaactgaaggttcaaaagcaagggcacaaaaattgtgaaaagacaacatgatccttccacatcctaagataagcaaaaaaacatctctacttgggtaattgatttttcagtcggctaaaagtaatagttttattttgccaacaagatcagctatatgcttgtagagtggaacctgcacagcaacaagtgtccaatgatctgagaataagaattatgtgcggtggcatgacatatttatcaaatcatgatgattttagaagaaaagcaacaactcttttttagaagcaccagctttgcaagctatagtttacacagccagcatagcatttccaccaagctcagcctgcatttcgcacaatatcatatctatttcatttggataaaatctatttgcccgaaataaaggaacaaaaccaagatagaaaaaagtttaggcagtaccggtaagtggaaacacaaattcagtgaaaagaacataattatttccacatagtcaaataaaactgaaataatcagtatcccattgcccctatattgactatacccattgtaaataattgcttgagcgtattgagtcatcaattgtttgtgtacaacatgggtttgacaggaacaaaaagctacaggggagagaaaaaggaaaatgatctctgagtgttccaccttgtggcgtgccttttccaagtccacgatggactggtcgatctatgcatgttgctatgaatccatcccaccgagcacctttgacaccttgtcattgctcacctgcaccgcgtcaatgaataccctgcaaggatcttcagcctctcagagccccctaccgcatcggtggtaggataagggcatggtggggccaaggaggatgaggaggtggtgcgctaagggcatggcggggtcggggtcgcacnccctgtgggtgccgatgtaggcgtgtcgtggcgggatgcagcgaggtgaagcacgcgagggtgtgggcagaactgtcggggagctcatcgccgcaccagntcctgcgcgcggtgtgcgcacaccacaacctcgctatcccacccatccatcagctaaggtgggacgcgacgaggggg

SEQ ID NO: 169 - DNA, 4501 bp, Zea mays
  misc_difference 3724..3725: note = n is a, c, g, or t
  source 1..4501: mol_type = unassigned DNA
ggacgagaggcggaacgagctccccgagtcaacggcggcgccgttgcccgcggaccagacgggcacgccgccggcgtaggtgatggcggcgacgaagagcgacggggaggacgcggacgccgtgaagccgagcgagaaggtgctgttgggcgacgtccacgtcgccgagttgcccggcgagagggtcgaccccagcggcatgtccgcgccgcgggacagcagcgggaggaggaagaggcagcagccgagggccgcaaggcccccggagcttcgccgcaaagggcgcatctttttgccttcccggcggttcgggggcggccgcctcctctggtcccttcaaccctttatttttctccgatggcgatgggcgatggccgatggcagacgcagaggcagctggctagcagatcaaacctaagctccccgctctcacatgtggcatggcgtcttctcttgtcctctgcgattggtaaggttatttcgcaatggagcgcgtggatctggtattggcacgaggaggaaggactaggtgggagcggggggaattggattggaccgcccgggctggtagtggtagtggtagaacagaacagcggaggagagcgagacctggaccgggagaggcagaagcagaagcaagttgtactagactagaagtgaggctcctctcctccccatagatggatgatgcatggagcttgggaaaaaagtccaagcgtagaaacaacggaggaacggcactattgtcgggtcaaaatgtgaaatcaaaccgctcgttgtcgacagcgttggcaggccatgctttctcaatttttactactcgggatggctcattttatggttgacttgactgcggcagcttccaacgagctcaggctcaggaggaagaggaagaactttccagttttcatcttctgacgaaaattcctcaggacaggagacgataatgctctctgttccggaccaggtatgtcatgccgcgtggtacggtccaaaccggaaatacgtgcacatgtgaagttggtgtatatattatacatatgttaattaaatcaccattggccatcttaatttaatgtctccagatacattttgcaatgaacacattccaccgttcactactttggctgtgtttggagagtgttcctgtaaaacatacacagagcaattatagacattaggtctgagataaatacgatttaatataagatgtgcacttctcgtagcggcacggcgatggtagtagtgctgtaggcgtatcatgaatggagcgagcaatcgccgccgtccaaggcaggcatcaacggtcctgatgatgggaatggggtggatggtgccttggtgtgggtgggcttgacttgaccgggttctagggcaggctggatgggtgcgtgtgtggtgggtgggtgggtgagtctacgggtcaacatggacggcttaaaatagattgattgattgatagacgctcatcctcatctgatgccttgcttggttttttttcttttcttttctttttcctgctcacattattagagctcagcacttcctttttgtattcgctgcattgcacgccgctattgtttttctgcttgcaggttgacttggagcagcagttgggttcacatgtcgatacccctgacgttaattaattaattgttagaataatcacgagatccatgacgggttgatgggcttgcgtgcatttggatggacgttggaaaacaacatcagttttatagttattctttcactttattttgtaaatatttgggtgtttttacaaccacggagtttaacattcgcttcttggaagttgctccccacgcacattagtctagataatcgaaaaaaaaattacctagtttttactccgtactataggctacagccgctcatgcattacaattcaggggaacaaaaacttgtcatcactctctctctctctctcacacacacacacaccattgaaccaaaacacacagaaatctaactacacatctataaatagatccccatccatgctgctggcaatctacatcaccaacacctcacgtccatgttgtgtcatacatttttttatttgctcttgatcgtctctttttcattgaagttgagcccaaaaacatagccaatatgtagcgcagaataccacttgcataaaaatttacattgaagcattatctaagaccataccatctctactcaaccaaattgcccagcatacacaactgaaaccgctaaaaaatcaaccctctcattttttttcaaccaaatcactgagccaagaactaatttgaaccaaactttgcataataacaattcaattacaaagaaagaagagatgtccaatagtttttttactaaaaaaagaacaatttacattattcttccaattacacattacaaggccatccttagtaaacgtaactccaagacaaaagtaccacatgaagatcttgatcttcatctgcattttaatcttccatatgttcttattcatgactacaatgctactatccaacaagttattgtacataggactgggcattcggttaatcgaagtttttcgatttgatttttggtttttttgaagttcagtttttttataatgccaaccgaaattatgtatagaaaaaaagactggacatcggcttaaccacaccgttcgattcggttttcgatttagcgaaaaaaccgagctttaaaaacaagtaaacttccatgcaataaacgaacaaatattgcaacatatgcaactaccactcgaagtctcaaccactcgctccacaagacctcacttgcagtgaactgggcagtagggataaaaacggacgaacacggacgaaaaaactcctctcctgttttcgtatctgtatttcatcatcgaaaatgggatcaagaccggaatagtcgggaatagaaacgggagagggatagatggaattgcgaaaacaaacgaaaacggaaatactaacaaaaactcataatttaatacaaacagaaatgatattgatgtttgactagcgattgaatagcatgacaataaaataaaacaaatagatacagagaggcaacattcttttattgtttggttactaatggtgtacatttagctacatctgacgttgtttaagactttagaccacttgtcattgaaaagagccgatggttataatgtcaacttgtgctataatttgtcacctaaagacacgggtctttagtttatatactaatacatattagacctgtcccatatttatcaaatacaaaataaatacaggttcaatccggataaaaacggaatcccacaaaaatggacgaaataaaccctatctcgtttccgtcctgtttccatatttttccgaaaatacgaaaataatcatgtcaaatgtagaaagtggtacgagtagggggacgggattttatccgtccgtttttaacaggcaacgtgctggcttttgatgtttcaactaggcggtagccgaccaactcatcaagtcaacaactgggcctaagcgggaccacaggagctggaacccgtgtggaggtgagctcgtgactgtgattcagcttcaccgcatgaactctgggtagtggggtggtatgattagggctcaaaacgagacgagctaagcttggctcaaccatttcacgagttgaggagacaagctcgaggctcaatcatttcatagagcagaggctcaatcatttcatagagcagagnncaatcatttcatagagcagagacacaacttctgttctagtagataaattacaacgtcaatagaaaaatgttaataagtaccttgccctgcctctaaaatcagcgacgaaaactaaatcgagagaccaacagtccataatatgtgtatcaaataaccagcttgagtccgaaagatagagaaaataaggttaccagaatatccaactaactctaataacaaagattgtacagaaattaccttcaaatgattaacaaccattttgagattatttttatatcatgaaactggaacatgttatcactcgccggttcttcctaccatggctgcatcatttgctctaaagaaaatagtggttgcaagagaggatgttaaaccatcctacaaggcatatgacgatttgtcgcatatcaatatgtatgacgacacactaactttacaccaatatatgcacaagtaccacgttgctgctaggctggatggaactatcttaccaacgaaaagatgtgatgtactaagaaaagagcccatcttgtgttgtatccaccatagcctccaacaactacatcaacttgacacagaaaaaaacggatattatgtacatcagtaaggaaaactaagaaagaaaatgacaaaaatccacctaaacattaggggtgaggtttccgttagaatcacgtttagggtttagggttcttctcacgtaattactctctcacctctctgtaatgggtcaggcctagttaactcaagcctattaatacaacactcatccctaa

SEQ ID NO: 170 - DNA, 3001 bp, Zea mays
  source 1..3001: mol_type = unassigned DNA
atcctctccttacgcctataaaaggaaggaccagggccctcttagagagggttggccgcgcggggacgaggacgagacaggcgctctcttggggccgctcgcttccctctcccgcgtggacgcttgtaacctcctactgcaagcgcacccgacctgggcgcgggacgaacacgaaggccgcgggattcccacctctctcacgccggtctccggccgcctcgctccttccccccttcgcgctcgccctcgcgctcgacccatctgggctggggcacgcggcgacactcactcgtcggcccgagggacccccccggtctcgaagcgccgacaatacatgtcttaagtttttttaaattcactcctttagacacactttaagatacagcttaagatatccattgtacatgccctaaggggtgtttggtttctagtgactaatatttagtccctacattttattccatttaagttgcaaaattaccaaatatagaaactaaaactctattttagtttatatatttggcaatttatacactaaaatgaagtaaaatgataggactaaatattagtctctagaaaccaaacacccactaaagtgtaacaaaaaaaaacatgagttcagagctacaaggcacaagtacacgtgttagtcttaaaaaaaatatggaatctcggatcctttccggctaccctgacactaccaagattcatgaaaagtttttgccgaaattttgaaccctactactgtcacgtcagttaggacatgcataaaaccaacagccatatctagctaaccgttttgacaagtaccgaaacgtgcttgcgtgcgcgcttctttactagacagagaggctaccagcctaccacagccactttcatttcgagaccccgtaccgccatcactcgacgcgatgtgttttaaatttgcgtaaaatcttgttttatccacacaaaaaaaaaatcataccatggcgcacatgtgtgggtccgcgtctgaatttaatgtgctgccacgtacgataagacaggggttgttcttcgccaagtgcatctgaggaaggaactaatcaatatatatatagtctcgaaagccctcttgatgacagtataaattgagtgattagccaagactaggcaaacggttcacgtaaaggcctgatggagctttattacactgtgcctatatgtgtgtgtgtatgttttttttttttttgccataagctgcacgttaggtatttgggaaattggtaaggttgctcaattatggcgtactacaagctttagccctaattacgttattgtccacacgctgacgcacacgtatatgcatatatatggcactcgacgactatagttttttttttaatctttccttccagccttcaccacatgtcttgaacagaacaataccacgattcaattgcttcgtgttcctctaaccaaggcagtcccttcgaacagattgcaagcctctccacaagacctcttaccaaggaccaaatggaggcaatcatgtggccggtgaatcaaggaaaagagaagacaatgtcaaagaagagggggtgcgaggtgcctcctctggttcccccagccacacctagactgcggtgggaaattgagcatgctgccctgttggttgtccgatgtttaggacttttccattgttcctatcacacgtggattaaatgagattggaaaaaattataagagattttgacttgttcgagatttaaaaccactcaatcccacttaatccacatggtttgagagaacaaaacaaacaagcccttaatgttacaccagatggattgttcttgttcctgtcacagtggggttatctagttatgtcattgaccgtagtgctcggtgttctggtgtctagtcggtggcttttgtatccctgccatcgagtgcctagctttgtgtttgcctgctttcagcttgttagtctggggtttgccaagtgacagtaagacacaatcctttcgtggtgggagactttgggtgccttgttacatcagatattcgtttcgatgttttccttgtgcctttctgttttcccaagtagacgtggtagttaaatgtgtttcaattgcactgtttttttttcatggaacatgaggggtttaaatgaccgtgctagtgaaggatgagatgaacaatcctctctacaggacaagagcgtccctgggtctatgcgggctgtgcgaccacacaagtaccccaaaattgcagggccctaattttagtagaggttcatatatattaaatgaaaaaagtattatattccatgtattctaggccaaattatttgcggtaactaaaaagattgtgtcacgctgcatcacgactctagaatctaagtggtgtccattgctcttccaaatcctacgcgtcttacttagacctggaccaatgtcggtcagtaatatataaatatacaagcatcggttagtagtatctacgagaacatcattggagataatgctttttaaatagagaatatgtaactggtacaatttaatacatataatttgtattataacatcattgtaatatcattggagataatgctttttaaatacagaatatgtaactagtacaatttaatacatacaattgtaacatcactggagatgatcctacaatgactaggattgacagatttcttgcgacaactaagtggcatgatctcttcccctcggcggacctacaatccgtttgcaccatgacctcggaccactgcccgcttattaagcaaggtcgttcttccttttgcttcttccgtttgcaccatgatttctcgtatgcacgtaaatgcattttaatagattcatctacatatcgctttaactgatctcctcgttgatccatgaaagtcgtaagagatagatctggagtacttacagcgggaccctgcagtggaggtaggagagattccatatcgatctctccttgacggacgatcttctggtggcgatccaccgtgaagtgtgacaag

SEQ ID NO: 171 - DNA, 6301 bp, Zea mays
  source 1..6301: mol_type = unassigned DNA
tatattacttattatatagagccatcacaggtcacaataaacgtgttacatgaactaaccctagaataattccatcattcatatgaagagatcctgaaagcagaatgtctaaccccacagattagattatccacgaccaacacgactgtcaacaaaactacgtcgccctaagcctcgtcccacccccacatactgcacccagtaatctgacactgcaactcacatggtgacatacaggcttgaaaatgttagtgatgtacgaactatataagttttctactgagatcaacagcataaggctctagtggtcaaaacgagtttggattgagaatcgcctcgatcccgcatggattggtccggatcgtcgaggaatggatcggtgagtggtgtttggatagcgagatgcactaagcatagcgagtactcaggacgcaaaacaaaccgccgaccaaaatctacagctagccaagtgcgccagccaaccgccgccgccgctacgcgcataaatgaaacctttacggaactagaagaaccgaggacctatagactcctagagcggcggcgctacgcggggctaaacaataacaacaccgccgcggctcagatctagacgaaagcgagcgagagcaaagcagcggggaggaacggatgtgtggcgacactcaccatggttgcaagcactgagtgggatgccgctcctcggcgccgcctgctgctgctgctcctccttcgcctccgtgctccgccgcagccgccaagacaacgagagagaggaataaggttgggagagtatatatagttgtttggggtagggttttagtttgcgggattcaccaatttgccctttgacgggccgtttgggcctcggccctgtagtgcggtggcaacaggcctacgttctaaaatttggcccgcccttcaccggccatcgacgagttcttttttttaaataacccttctctctccttcctttgagaatacggataggatcataggagcactgtatttatttgtctctgtgaaaaataaccatcaatctataatggactgcagtctaacatagaaagttagatgtgtgatagacaatgtcacacaagtttgatgtatcatagcaaaaatattaccttacatcttatttactaatgtcacacaagtttgatgtatcgcataaaatttttcttacatttgatgaagtgatgaacacatatcaagtgtaatgttatattttgtgtaattgtatggtcaaacaatacatttatttgattgcataggatatctattgttagttgcaggtatattcgatggctcgcacacttagttgattgtgtttctggtgattttttactgattattatttcgatgatattatcatgctagtttagagccatgatatggagtaggcataggcaccgttctcgaaaaacatgatttgttcatgtaacctttggcagagctccactccatgattctctagctccgatagtcgattctctaacagagtgataccgagtgattctctaacacaaatgaatttatttgacaaaatcgtttgacaaataggctctgaagtgattcctgataagttagagagtggggaggagggtttctttatctcactctttataaaacactagttgattgaccgtgcgttgtgacggctcacaacaatactcacgtaaaatatccaccaaaaatatatcaagatttttattgattgtctccgcataatattttttttatttgactaactgatgttgttgtttactccatccaatataacaacacgaccaatgaaaggagcgattagaagagagttcacaacgattgactaaacggatagatattatagaatggcataattccaccatacagagacaaaataagagggtttgtgatctcaagattctaaaataagtcacatgaactcaaacttataaaaaagatagatcaaaatatagagtggttgctaaagttatgcatcaataaaaactgaatgcgctccatacaagttatggtacttcgtaccaattattaacctttccatttacttttagcgtgacaaatcattgctgcttcatccaattcagcaacctcaaacatcatggagtccattgcaccaatgtggtctcagaaacggcttaatgcatgcaagagccaagaacacaagggacgaacaccctatggtaatgctcgtatggatcaccgaatcctaacacatattttacaggatccatgaaccatcatcagaagaacacaaaccatgtgcagaaaataaataaagtattatcacacccaaattatgttaagtccttagcacaacaaaaaaactaacacttaaaacaacagaggaacaacataataatttctgcaatgataaaaggatgtgtgacagatacatagaagcggtacaagcataccgagtcgacaccatggtaagggaaaaagccatgtagacacgcgatgtcgagccatcgaacgagtaccatagacagcaaatcagggaccccccatctctcgcctccatcacttccaaggttttgtagagcaggaagagaacggaagagttgggcatacctgttcgttgtcgaagaaggacacgacgaaggtctgggcatctagagacgacatagctagtatgtcgctagatacatatagggagagagcacgtaaacacagaaagtagcatagccaaagcagctccagaccgagaggcacccacatcagacgtcagtccgagaaggaaaccctaacatataaagttagatatgtgatagctaatggcacacaagtttgatgtatcacattaaaattttcttacattttatgaagacatatcgtgtgtaatgatatatttttgtgtaatcgtgtggtcaaacaatacatgtgattgcatataatatctattgttagttgcaggtatattcgatggctcgcacacttacttgattgtgtttctggtgattttttactgattattctttcgatgatattatcatgctagtttagagccatgatatggagtaggcataggcactattctcgaaaaacatgatctgttcatgtaaccttggttccgcttgtttaaagctaaataaatgacataggcaagcatcctcagggcatgtacaatgtagataccacgacacggttctcaaagtagaagatataattaagacatagttaagtacaaaggagtgtgtctaaagccttgtatcttaattaatactgcatactctttgaattaaatgatggttgatccattgtgtatatgtactatatatacacatatatgttgcatacttgacaaattttgcaatataaaatatacatatatggttgatttaacgtggaccgtactgttgccatatatgttcaactaaatcatttttgagctcgatgtgctttgagcgatccctaatctctgcatttggtccaagtacatatgcaaaacacggattaacttgattgctcactttgagtgataaggcgatagatgctccaggattctcattcaaatccaaaggtatcgtagctatttccttttcatcttcaactatcatgtaggatattactcaaatgaaaaggcagagaacctgtaggattgcttaaaagatatagtagtattttgcttagatggcaaacatgtctattcacgatacgaaattcattgttgttgcttaatcaattgcaagaacagatctacgacttaagtaattggaagaatagatatatgggatcaaagaaattagcaaagaatagattattgtgggataagaacagacctgcgggattagttgcaagcacaggcctacaggatcaaaggaacttggctgaatctaagggcttgttcgtttccgtcggattgcacccgaaattgttccagctaatcaaagtttatataaattagagaagcaatccggtcaggaatcgttccgacccaccaatccggtagaaacgaacaaggcctaagggatttttgcaggacgttacctttcaagcagatccatgaatgtgtagcttgccaaggatgatacacgtgttgggcggcgaatggacggtgggcgccgtcggtgaaggacccctgtgcgccgacgggggaggaggttcgagagggttgttgttgccaacaataaggggaggacatctagaaggaggtaagagaggggtagcggcggtcggatggagaaccggaaagggtggtggtggcggctgggtggtgaaggggagaacctgtttctttccgattcatggcaaaaacaaatcgacgggactagtgatgaaaaagtgaccgcaaaacagatgaacgggagcactcgatgccaaaaagaccaccgacgttcatacaacgcaacgacatcgtagcttcgccacgagccatgcgcgaggaacggtgcattcgtcaaggatcgagtcttcgaaaattttacacgatatattaaacagcgtagggccggaccacattttctctcaccacttttcacgtcttctctcccttggcaattttaacatatgagttaacggacaaaacacattaacctcatgactcccgccgagcacagacgcaactgcaccagcctgaatcttcagatggacgacaaaatgataaaaaaaaacttggcttcgcccgggttcgaaccggagaccttcagtgtgttagactgacgtgataaccaactacaccacgaaaccatgtttgtgtttttgttgtaccttgtactgtaatatactatatagcacttcatgctgtgtgattacataacagaaggtgatcgcagtctataaattaaagactgcaagcctatcactatcaggccgattccatgcattatttcagatgctgcgttgtaagtgtacaaatccgtgggggcgtacagattgaggagagaaaaatgtaggcaggcacacactgtaaactagctagagtgcacttcagatcattttagcagcgtatacattgggaaccctcacctgctgcttgaaaagaccagcacacagtgcacacccggatgcctgaaaagttttctagttagtttcctcgtcacgtgtaagcatgaatccatccttcattctcaacctaaaacatctctatctgactattcttggatgaagggtgttttctatcgcgactaatgaagagttcctttcagaacagaagtactgttaaaaaaaatatcggaacagttgtgtgtgtgactgtcaaaccctctgagcggtacctcatcggacccaaatagtttcggaggtgtgtcggattggtctgacgacatgtggcgatctatacaacaataatgttttacctagggttttagctatagggtcataagaccctatgaatagtcgcctcatcggaccaaggtggatgggtctaacgagtgttgtgtgcagtgaccagaaagggtccagtggacgtcagatcatacgtccaagccaatgtgttgctccccacccccacgtatgggagacctttaatctcctctaacattttaattacttcatttctttatgataataaccttttttaagtaccgtaacttgagagcaaaaatgtgtagctaacatttattcataaagaaatgaagtaataacctttatgatttatttaaacttcaaaagctattgaaaaaatgtcaataattgaatcatagtatatggagagaaactgtatagggtgaattattagagacttctagttgtgaatggagtatttttttagggtgtgttgagcccaaaaacgggcaggcggacggtcctcgcgtgcgcagaatgagagttccagatttctagcgggattaactcgggaactgacttgtaacgggtccagacctcctccctttatatagacgaaagactacagctgattgaaccctccacaatcgatccaatcaactatacttatcgtttttactttatgcattaggagtagctctagtttagcctatctacctcgaatcttaacctctctccggctctacgtcgactagaggcgtcttgggtgacttgttgacgccaagacacacccaagatctctcctccccgacggggttcctcccgggaggcgaaatctaggtatgttgccaagacgatgactttgtacaccatcgcggaccgtccgagccctaggcacgcaccatctagacgtatgcagaggaggagtcgctcctacatccaaggtgtgctacggaccgtccgcgcctccgcagggagcactatcatgtggttccttccagtgtttggtgcccagatcgtcgccaacacgttttttggtgactccactgggatcaggtgtctaggtctactaaaa

SEQ ID NO: 172 - DNA, 4151 bp, Zea mays
  source 1..4151: mol_type = unassigned DNA
gaaagtaatgtacaatagaagggagcctgacaagctcccgggatgaaaatacatacgaatagggtgtaggaaaaaacattcctatcatgacctcacagaactgtttgcacccctaaagagcgataggttctccttaacgcgcctcgccacctggagcaaagaaaccgaactttgtttgaatattctctcgattccattctttccaaatgtttcacgtcatttaggtagtgacactgttgaaattcctcgtgcgcctttttgggaagtgggcctccgccctctcccaccaatcacccagatttgtggtgctccgcggatcggcctgctgggaccagagacatgttctcccaggtgaggacgcggttccaaacctcttgtgcaaaagcgcaagtcagacataaatgaaatccagattacataggtctgttgcacagggtgcaaaacgtttgatgaggccagccgcgtcgcacgaggttatccgctgtgaggatcttattttagatgagaatccaagcgaatactttgcatttgttttccgctgtggcgcactaaatgagatcaagcttgtggccacagtaggagccgatggactgggctctataagcagacctagaggagtagatgtcgtctggcgtccatttccaagtaatggaatcttgaacatcctgctctaggtggatttgttgtagcctaatccagagcgcggcaaattcctcaatttgcacggttgttgtgattttccttcttagcggattgatccaggcgtcgcttgttagctcctgtagtaccgacatgtttttcctcctgaccagagcaaagaggtggggcgctaggttgcaaggggcttcgccgtctagccagctatcctaccagaacttagctttggcaccgttaccgacggctatggaggtggaaacttggaaaagcaagcgatcaagtttgttgcatggaacctacaggtcttgccaaggttttgaktgrgccstctagatgcatgctcgagcggccgccagtgtgatggatatctgcagaattcgcccttaagtctgcccaagtctttaggtctactcaccgttggccaattaaccaggcagtggcctccacttgcattgtctccccctttccaaaggaaggaccgacgaatcttatcgatttgcttcctggcccattttgcaagggggaagatggacatgtgataggtcggcatggaggagagcaccgaggtgactagggtgagacgtcctgcccggttgaggagttgtcctttccagcccgttagccgttgtccaatcttttccactaggggttgaatatgaattttttggagaggcctagtatgcagttgaaggccaaggtagcggcaagggaacgatttgcagctacccgggaagggttggagaatgttcgtcaagtccatgttcgcacaattaatcgggtgaaccgagctcttctcaaagttaatgaccagacccgtggcagaaccgagctcttctcaaagaatttgcttgacataatcagggctcacaaacatcgcagcatgtgttacaccattggtatgtaaatagctcagatttgcaaacataggttggaatggttagacatgtgttacaagaaataaaaaatcaatgagacattgagagcgacagatttaagactcttactcattaatgcaatcacgtgatgataaaagggatttacaagctttgagcattcagattacgacatgtgcattaaacatacacgaattctaaacaaattgaattgtaaatggcaatcttagcaggactatttctaaacaaactaaattataaacatcgttaagaagtataacatgggttacaagaaagaaaagatgcataaacttgtcctggttagaggataaaaagcaagaacaatacaccgaaacctgtaaaatttacatcatacaattttcaaaccccctaccttcccaataataagatgctttggtagtcctcgaaacatacaattcacattgaacttagacaaaaaaaaatatctaatttataatggagggagtacatggctacacatggataatgtgataacggaaattgtatctgatggctgttgagcatgtttattacagctgaatttttgaactacagtcaacaatggcagttaggtagactgaacaagttcctaagtaaatctagcatgggaccaaataagtagatgatacaaattgattgtaacatactaataacaagcagtggtcaaagtggacctaaacaatcaattccctgtatattagagaagcttacttttatttggtatctgcactgctatcattgccatcatggtgcaaatacattatgtgcagtaccaatacaaatagacataaaataatttaaattgtgttaattaaaattcatagcttgcattgccattgccgtgatttaggctcttatatgttgaatacaaggtcctctttttcagtcacaggatattttgtctgtagtttcaatgatctattgttcctttagttgtaatatgcaggttaggcttaatgcaaaaaactcttgctgctgatgcttcacatgtttcctctgcaatatattatgttggtgtaaatacattatgtgcagtaccaatacaaatagacataatataactaaaattcatagcttgcattgtcattgttgtgatttaggctcttctgttgatggctttcagataattgggcaacggtgtgtgtatatgttcagattcagaaagtgaggacaatatagcgtttgcagcagtggtaagttcattcttaatacccacaagcgaatacccatttgtagcagtgttaaccatttagctcgaccgaaaagcaatcaacaaggcttgcttgcgaattggcacattgtaattaacattttgcatcattccttcgtcaaaaaagaatgtgagccgtagtggttcgatccctaaggcggcacatttttttgcttttcctmcaggtcgtcgccctgtgcagggagggcctgctgatcagagatcaagagggaaagcagaagacacgttgtgccgggaggaaacacacgacgaagtagagacttagaagcaataagctaaatattttgacaactttaattcgagcaggtgtctcaaacaactggttaattcgttttgtgaccaaaagaggaaaaagggccatctaatagttctgtaaaacaagcacttgcttaatctccccctcaactcgccaacatgtgtgtgccttctgcgcttgctatttgcttgggtgcccctcctatgtggttgcacctgcaccctcctgtccatctcctcctcctgctcgtttttttttttttgagtttttggaagctaccctcctatctctttccttaaaaccgcaacacctttccctccgcgcccgcacttcacggctgccaagaagtcttcaacgcccgacgcgtggccgcacagggcgaggtctcgctcgatggccaggcttggccttcgtgccaccacccacccacgcttcctcaccaccgtggagatggatgtgtcgctgctgtggtggccctagcttctgcgtgggcccacgtgtagatgccgctggagaagatttaaagggcgaattccagcacactggcggccgttactagtggatccgagctcggtaccaagcttgatgcatagcttgagtattctatagtgtcacctaaatagcttggcgtaatcatggtcatagctgtttcctgtgtgaaattgttatccgctcacaattccacacaacatacgagccggaagcataaagtgtaaagcctggggtgcctaatgagtgagctaactcacattaattgcgttgcgctcactgcccgctttccagtcgggaaacctgtcgtgccagctgcattaatgaatcggccaacgcgcggggagaggcggtttgcgtattgggcgctcttccgcttcctcgctcactgactcgctgcgctcggtcgttcggctgcggcgagcggtatcagctcactcaaaggcggtaatacggttatccacagaatcaggggataacgcaggaaagaacatgtgagcaaaaggccagcaaaaggccaggaaccgtaaaaaggccgcgttgctggcgtttttccataggctccgcccccctgacgagcatcacaaaaatcgacgctcagtca

SEQ ID NO: 173 - DNA, 19 bp, Glycine max
  source 1..19: mol_type = unassigned DNA
tctccaacacaaggttttg

SEQ ID NO: 174 - DNA, 19 bp, Glycine max
  source 1..19: mol_type = unassigned DNA
tatgcagtatgcagcagat

SEQ ID NO: 175 - DNA, 19 bp, Glycine max
  source 1..19: mol_type = unassigned DNA
tattcgatccaacatgaat

SEQ ID NO: 176 - DNA, 19 bp, Glycine max
  source 1..19: mol_type = unassigned DNA
tttcaccataacttttaag

SEQ ID NO: 177 - DNA, 19 bp, Glycine max
  source 1..19: mol_type = unassigned DNA
tctgcagaagatgtgcact

SEQ ID NO: 178 - DNA, 19 bp, Glycine max
  source 1..19: mol_type = unassigned DNA
tggaccatattcatgttat

SEQ ID NO: 179 - DNA, 19 bp, Glycine max
  source 1..19: mol_type = unassigned DNA
tttggtatccttcaactta

SEQ ID NO: 180 - DNA, 19 bp, Glycine max
  source 1..19: mol_type = unassigned DNA
tttatcatcagactttggt

SEQ ID NO: 181 - DNA, 19 bp, Glycine max
  source 1..19: mol_type = unassigned DNA
tttgtgtgtctgccaccat

SEQ ID NO: 182 - DNA, 19 bp, Glycine max
  source 1..19: mol_type = unassigned DNA
ttagatgcagttcatacag

SEQ ID NO: 183 - DNA, 19 bp, Glycine max
  source 1..19: mol_type = unassigned DNA
tcattcatctttcgaccag

SEQ ID NO: 184 - DNA, 19 bp, Glycine max
  source 1..19: mol_type = unassigned DNA
tgcaatcactccttcaaca

SEQ ID NO: 185 - DNA, 25 bp, Glycine max
  source 1..25: mol_type = unassigned DNA
tgggatgtcactccattctgagtag

SEQ ID NO: 186 - DNA, 25 bp, Glycine max
  source 1..25: mol_type = unassigned DNA
ttttcactaagaaacaccactacat

SEQ ID NO: 187 - DNA, 19 bp, Glycine max
  source 1..19: mol_type = unassigned DNA
tttctcagtttttccataa

SEQ ID NO: 188 - DNA, 19 bp, Glycine max
  source 1..19: mol_type = unassigned DNA
tgcacaatcataacctcac

SEQ ID NO: 189 - DNA, 25 bp, Glycine max
  source 1..25: mol_type = unassigned DNA
tgtgtccctgaccttgggatccaag

SEQ ID NO: 190 - DNA, 25 bp, Glycine max
  source 1..25: mol_type = unassigned DNA
tctgctcatggccaatttatcatat

SEQ ID NO: 191 - DNA, 19 bp, Glycine max
  source 1..19: mol_type = unassigned DNA
tatggtaatcaaacacacc

SEQ ID NO: 192 - DNA, 19 bp, Glycine max
  source 1..19: mol_type = unassigned DNA
tataaattaagctagctac

SEQ ID NO: 193 - DNA, 25 bp, Glycine max
  source 1..25: mol_type = unassigned DNA
tgtctctagtcattctttggtcttt

SEQ ID NO: 194 - DNA, 25 bp, Glycine max
  source 1..25: mol_type = unassigned DNA
tttggtagactcacaacactaacat

SEQ ID NO: 195 - DNA, 19 bp, Glycine max
  source 1..19: mol_type = unassigned DNA
tcaatcatacatagacttc

SEQ ID NO: 196 - DNA, 19 bp, Glycine max
  source 1..19: mol_type = unassigned DNA
tgtgattcacatactttca

SEQ ID NO: 197 - DNA, 19 bp, Glycine max
  source 1..19: mol_type = unassigned DNA
tcagacacataataacggt

SEQ ID NO: 198 - DNA, 19 bp, Glycine max
  source 1..19: mol_type = unassigned DNA
tacgggatccctaattttg

SEQ ID NO: 199 - DNA, 19 bp, Glycine max
  source 1..19: mol_type = unassigned DNA
ttttagcccacaacagaac

SEQ ID NO: 200 - DNA, 19 bp, Glycine max
  source 1..19: mol_type = unassigned DNA
tacattgatcaatcagcat

SEQ ID NO: 201 - DNA, 19 bp, Glycine max
  source 1..19: mol_type = unassigned DNA
tgaccctcactcagctgaa

SEQ ID NO: 202 - DNA, 19 bp, Glycine max
  source 1..19: mol_type = unassigned DNA
tatacctatatactgtttg

SEQ ID NO: 203 - DNA, 19 bp, Glycine max
  source 1..19: mol_type = unassigned DNA
tctaacatcatatttatat

SEQ ID NO: 204 - DNA, 19 bp, Glycine max
  source 1..19: mol_type = unassigned DNA
tttgactaccataatttaa

SEQ ID NO: 205 - DNA, 19 bp, Glycine max
  source 1..19: mol_type = unassigned DNA
tttttgccacttccttgta

SEQ ID NO: 206 - DNA, 19 bp, Glycine max
  source 1..19: mol_type = unassigned DNA
tcactattgtttcatcttt

SEQ ID NO: 207 - DNA, 19 bp, Glycine max
  source 1..19: mol_type = unassigned DNA
ttccgatccaatcgaagct

SEQ ID NO: 208 - DNA, 19 bp, Glycine max
  source 1..19: mol_type = unassigned DNA
tacatggccactcattctg

SEQ ID NO: 209 - DNA, 19 bp, Glycine max
  source 1..19: mol_type = unassigned DNA
tggtgcatgactcacatgg

SEQ ID NO: 210 - DNA, 19 bp, Glycine max
  source 1..19: mol_type = unassigned DNA
tccatgaatgcctgtctat

SEQ ID NO: 211 - DNA, 19 bp, Glycine max
  source 1..19: mol_type = unassigned DNA
tttacgcacattcatttgt

SEQ ID NO: 212 - DNA, 19 bp, Glycine max
  source 1..19: mol_type = unassigned DNA
tctaattgtagactatcat

SEQ ID NO: 213 - DNA, 25 bp, Glycine max
  source 1..25: mol_type = unassigned DNA
tctgtcacacccaaccaaatctcat

SEQ ID NO: 214 - DNA, 25 bp, Glycine max
  source 1..25: mol_type = unassigned DNA
tgacggttatgcctttcctgcatag

SEQ ID NO: 215 - DNA, 19 bp, Glycine max
  source 1..19: mol_type = unassigned DNA
tattaatttaccaccaaag

SEQ ID NO: 216 - DNA, 19 bp, Glycine max
  source 1..19: mol_type = unassigned DNA
tccgaagcaaccattttac

SEQ ID NO: 217 - DNA, 25 bp, Glycine max
  source 1..25: mol_type = unassigned DNA
tccaattacaccttccaatagggat

SEQ ID NO: 218 - DNA, 25 bp, Glycine max
  source 1..25: mol_type = unassigned DNA
ttcttaatctcatgcaatgttcttt

SEQ ID NO: 219 - DNA, 19 bp, Glycine max
  source 1..19: mol_type = unassigned DNA
tttactaaatctcattcat

SEQ ID NO: 220 - DNA, 19 bp, Glycine max
  source 1..19: mol_type = unassigned DNA
tttcagaagacccttttat

SEQ ID NO: 221 - DNA, 19 bp, Glycine max
  source 1..19: mol_type = unassigned DNA
tctcctatttggagcttgg

SEQ ID NO: 222 - DNA, 19 bp, Glycine max
  source 1..19: mol_type = unassigned DNA
ttgcccatccttcatatat

SEQ ID NO: 223 - DNA, 19 bp, Glycine max
  source 1..19: mol_type = unassigned DNA
tccaatacagataacattc

SEQ ID NO: 224 - DNA, 19 bp, Glycine max
  source 1..19: mol_type = unassigned DNA
tgtgcctcgcgttaatttg

SEQ ID NO: 225 - DNA, 19 bp, Glycine max
  source 1..19: mol_type = unassigned DNA
tgtacatcatcagcattaa

SEQ ID NO: 226 - DNA, 19 bp, Glycine max
  source 1..19: mol_type = unassigned DNA
tgctccccaagctccaaat

SEQ ID NO: 227 - DNA, 19 bp, Glycine max
  source 1..19: mol_type = unassigned DNA
tgttccaatccaagataag

SEQ ID NO: 228 - DNA, 19 bp, Glycine max
  source 1..19: mol_type = unassigned DNA
tctaaccgtcacaagttta

SEQ ID NO: 229 - DNA, 19 bp, Glycine max
  source 1..19: mol_type = unassigned DNA
tcaccagtcataaatttca

SEQ ID NO: 230 - DNA, 19 bp, Glycine max
  source 1..19: mol_type = unassigned DNA
tgttccaatgcaagtttac

SEQ ID NO: 231 - DNA, 19 bp, Glycine max
  source 1..19: mol_type = unassigned DNA
tgtgacggttagatcccat

SEQ ID NO: 232 - DNA, 19 bp, Glycine max
  source 1..19: mol_type = unassigned DNA
ttaatacactgatctcaat

SEQ ID NO: 233 - DNA, 19 bp, Glycine max
  source 1..19: mol_type = unassigned DNA
tacctcaataaatcaagag

SEQ ID NO: 234 - DNA, 19 bp, Glycine max
  source 1..19: mol_type = unassigned DNA
tatatcacctaaggtggaa

SEQ ID NO: 235 - DNA, 19 bp, Glycine max
  source 1..19: mol_type = unassigned DNA
tcaagagataagcgtctat

SEQ ID NO: 236 - DNA, 19 bp, Glycine max
  source 1..19: mol_type = unassigned DNA
tacactaaaaatcttatat

SEQ ID NO: 237 - DNA, 25 bp, Glycine max
  source 1..25: mol_type = unassigned DNA
tccaccttaggtgatataagatttt

SEQ ID NO: 238 - DNA, 25 bp, Glycine max
  source 1..25: mol_type = unassigned DNA
tctatcaaaaggtaaactatatctt

SEQ ID NO: 239 - DNA, 19 bp, Glycine max
  source 1..19: mol_type = unassigned DNA
tctcacatgtgaatattaa

SEQ ID NO: 240 - DNA, 19 bp, Glycine max
  source 1..19: mol_type = unassigned DNA
tatgcaacccattatgtct

SEQ ID NO: 241 - DNA, 19 bp, Glycine max
  source 1..19: mol_type = unassigned DNA
ttagctcggaatacaatac

SEQ ID NO: 242 - DNA, 19 bp, Glycine max
  source 1..19: mol_type = unassigned DNA
tttgtgctgctatagtcat

SEQ ID NO: 243 - DNA, 25 bp, Glycine max
  source 1..25: mol_type = unassigned DNA
tcggaatacaatacattacaagttt

SEQ ID NO: 244 - DNA, 25 bp, Glycine max
  source 1..25: mol_type = unassigned DNA
tctataatctattatttgtgctgct

SEQ ID NO: 245 - DNA, 19 bp, Glycine max
  source 1..19: mol_type = unassigned DNA
tccaagtcataatctcttt

SEQ ID NO: 246 - DNA, 19 bp, Glycine max
  source 1..19: mol_type = unassigned DNA
tatcgatcacactatattt

SEQ ID NO: 247 - DNA, 19 bp, Glycine max
  source 1..19: mol_type = unassigned DNA
ttcatcgctacgtgccccc

SEQ ID NO: 248 - DNA, 19 bp, Glycine max
  source 1..19: mol_type = unassigned DNA
tgaaaccaaggaaagctac

SEQ ID NO: 249 - DNA, 25 bp, Glycine max
  source 1..25: mol_type = unassigned DNA
ttagtgtccttcgctgctttttgag

SEQ ID NO: 250 - DNA, 25 bp, Glycine max
  source 1..25: mol_type = unassigned DNA
tataaccattactcccataaatgat

SEQ ID NO: 251 - DNA, 5519 bp, Glycine max
  source 1..5519: mol_type = unassigned DNA
cggtttagtcttcctcttagtcatggacattttttagctgcaaggatagaataatatttttataaattatttatttatttatttatttttcttaccaactcactttaatttaattttttctcttctcttttattttatttcatctcaatcaaataactttaatttttaatctatttctttttttttcttcttacttatcatctttcattctttccttttttttttcttttcacaatcaaacacaccattaatgagtgtttgtaataacatcattgcattgcttccatattcactattttggacaaaaatccaaacatgtttaaaagaagcaaaatcaaaagaataaaaaaaaactcaaactacaaaacagaagaacatattttttgtttttaaaaattaattttttttctttaaacatataaaataatacattaccatccgtttttccccctatagtccaatcaaaacacaagtctatgaacgtaggctactactagcatgtgtagaagggaaagctacatagacaagtagttctgaacctgtgagtttttcttcccaaatgggaaaggaaattatacaatttctgaattttcaagggccataaagcctggcaaacatagtagagagaatcaggccaatcttctacgccctaccatgtggttaggacaacccgtaaagtctgatcataccacaggctaacagatgttggactaagaaaaaggttaccaaacactactgtctattccccacatttcttctcctctcctttcctctttattatttttttaagctcctttcctctttattattttttttaagtaaatttttttattgataaatattaatttattaattttactaaaagtaacaatttaaagaatttaaatttttgatttttttattgacaaatattacttattaaaaatattattaataaaaaattaaacttataatttttttaattattcaactcaatttatattttttttattattaaattcattcgtgtgcagtgtggcaggtactcatttccaggagacccgtcatacatgttactatacttttattatattcaatcttttgtgtatctccctaacgtgcccagttattttcaaatatatatagtgtggtgtgattgagaaagatttatgctgtttgcatagtgctgaataaaatccagtcaattcacatgaaagtggaactgtatgctctctttaacgaccactaatcatatactttattgaaagtaagagagttactttttagttgcatttaagtaatacgacactcttttgagtagacatcgtaattcatgggcatttgttgcttttattgttgtattaaaatattgtttcgttaagaaattatcttgcagccactttgtctggaaccacaagtacaagtgagaaactgtgactttgttcgttctggaaaacggtttaaagttgcaatattccacttgaataatgatttttatatatgcatggtcttagagttcacattggatctatcttaattatataaaattaatttataagaagagaattaatttatatttacatgatttattttgacttataagatcagaaattatactttatttttatcatagtatcattagatgtgacatctttaatattcgatccaacatgaattgcatagatcattttaacatcatcttaaaagttatggtgaaattaaatactttattttacctatatcattattcaataggtaagatctccaacacaaggttttgcagatattctgtaaatgaaagatctgctgcatactgcatagcattcagttgaagaaaaaattaccagtttctgcccctttgaattaatctttccattaaaggcattccatccatatctttgcttgatttgatggttctaactcgtggtttgcatatcacatcattctccgataatcaaggaatcatggaattatagagtgtgcaaaataaaaatgtactaaaaaaatatgaaatataaatatacaaacttatattgttatttaatttctagatagcaaaatctgccaatgtggtttcagacttcagtggcatggaagcatgggcaggggaaaagtgtggaaaatgcagaattgtatattagtatataataatacctgtaatttctgtctgctgcaatagtctatcattaagatattaataacactgcaatagtctagtagtatattcactaggtaattagatattgatgagattagaataagaaccactattcagctcagggaacataattggtcacagaaaggttctttggctgcaagtgacttgtgccacgtgtaattttcaagcttacagacaaatgcaaaaagattcttatgcacaaatcacaaaaccctttttgaaattttgtagtagaagtactagtactacatatttttcaccttccccaatatcattattttgctaccttggtagtcagcactaccttccagaattctgatcttggatctctcacattggaagcaaacaaatcagcggatttcctggcaggttggagatcgatctttgatgaataattgatcatgcataacaataataataataataacacaataagcaaattttaagcaagataaggaaaagaaacataataattttgaaaatagtgctaattaagtgcaaattctttctttcccttgcctaacctttaggaaccaaaagtaatttgctttcatagtgtccccttcacgtgtcaaattactctggttagtatgattatgacccttactttttttcttcaaattattatgttattaatgtaaaattgataattaatttctatccaaaaatcttattatctttaatggaattacaattttttccatatctaagatcttgattaaagattttaagttcaatctcaaactaatggcatgacacttaacttaatcaagtgtaataaggttaacctacacattctgcagaagatgtgcactgcgtgattttgtttgtttttacataacatgaatatggtccacctttttgtatgacaaatgcaaagacaatggtaatagatgcaccgtagggccatgaagccaatcaatctcagaactgtccgcaattttctcgactagtgaatatatagagacattgcatccactatatacttcattgcttacaaaatatgcatggaaagctttcctagctatatttttgtcacaatattatgatgagaacaaattaacgaaaagaagtagtcacacatgtcaaaaagaagcgaagaaaagttaaaaatccattaggggccaagtgtatttaagagctctattaagcattccaaatttcttttgacaaattaatcaagcaagaaaataaataaataaacatcaattctcatattataaatttaagttattgtgcttcaaaactatttaatcatatatcgttctcattttttgacacacgtgttatgaattatgagtttctttctttaagatatgcttttatgaagagttttgatgggaaaggaaaaacaagataaatttttcgtttttaataaatacttaaatttcttcaatcaatattaataaataaaatatttaaaattcattactgttttttaattgaaaaacttcaaacatttatatctttatactttacgttatatttttttattactagtagaatagttttccttttaaatatttataatttatttttattgcctaaaaattatttattttttatgttttacatatgtgtaaaagatcatccaatgagcaagatacttacaagttacaagctcgtgtttaactcaaaatgcatgtattgaacttttattattattattatttctttccttcgttctgtctttagactttagctcctctgttgagtctaaacaacactacatctgacctaagaatgagccccacccatgagcattgtttatgacaaaccctaataaatacattaactgattagataatacaatgttagtacatacagagaaacgtagccatcatgtaataaatttgtgtcttcattatcgaatgagagtatttttagaaatattctcattttcattaagtcacataacttctcttaaattaaataattagttttattttatttataattttcattttcttttcaaatgttacctcttaaatttattttcatgcatgcaaacgatgcgcatttaatcatcagttattgagaactcagaaattgcaaacctctctataaaaaaaaattgcaaacctatgatcaataatttaagagtttaacttttattcatattttgacggtaaaaagaaaatcctgttgttcatatttaaaatgattattacaaaaaccaacatttgtcatatatagtatgacatgataatttataaggctttttgtttacactaaagatattccccaacatttctcatgcatgtttagattaccctttggtatccttcaacttacttttagatcaactcatattataccaaagtctgatgataaaaaatattataccaaactcaagtttataatatacttttttaattcaaacttacatttacaaattttaatctaaacatatactatgtcagattttattgttgataatttataattaggtaataaataataatgtaaaagaattacaatgtgaatgcattctaattaaatttatatttcaaattttacaactaaattttctatttataattttactataaaaacgttttaaacagatgaaaattttttattgcaaaagaagacgacgatcctaacatttgtcaacaaagtcccttttaaagttcacactgagcaggtgtgagggtgagaacagggctctactgctaactatatcgaacggcggcagaatctcgcatttaaaacatacatactcatcaaatcataaattgatatagcatataattatcaatttatttatttttataaattataatgataatgatttccttaagaatcataatataaaacttaaactcttgtcaaaattttatttggtatacatgaatgcatatttctttacggtaaagttagtttttagattttaatttaaaggaacaatttgatggacaaaatataatttaactaacgaaatgtacagataaagttttatttgtactaatgcaattttatctgtacatttttaaaaaaaactagtacagataatataatttatcaagtactagtgtactattgcaaaaaaaaataaaaatttactgaactactagtgcaattttaaacaattcatagtttttaaatcagaaaatgatacaattttgaatttttgaattatatttaaaaaatgataaaattatggttttttttatcattttcagatttaacttgttcaatagaattgttaatttttttaaagaaaatgtaaaattatgtagtttcatatctgaaaaaattatgtagttaagatgatatatatatataatgaaaattaaagttataaaatttactaagcaaatatataattttttaattctaaatctaatacatacacgga

SEQ ID NO: 252 - DNA, 5600 bp, Glycine max
  source 1..5600: mol_type = unassigned DNA
tggctatttaatggatattttctctggacccatgaatgttttaacttccattgtgatgatctcgtgataaaccctacattgtgggtcctcatggctagtttccttgtaagctcttagtgcattaattattctccattttgaccaaaagaaagggtgattcccttcggaagatcattaattagacaggtgttttgttaccatgctagatttaccttgtctatcaaaactttgtgaaacttttttacacttaaaaattagtactaaaaataatgtggcttttagttaatattatacaatttttgacactttttaaaaaaatgctaattaatgtctttggcatattggttaaagaattaaaaaaatgtttttattgggatgtataaatttgtgtttctgatttttttttatgttttttttctatgatttttcacaataatactttatttttttagtttcttaatcagtatcctaagcataatagcataatgttagtgagattttttgttctcatgtcagctcaaaaacaagttaatattttcatgttgagcagaaaacaaaataaataaataataaaataagatgaaattcacactcttatgaatacaactttaattcaaaacttttatataaatttacttttatttatttatttccactctatcgaggatatgtttatttacattaaaaaagagaataaaaaatgataaaaataaacactaaaatgatatataatttccacttttatatattttactttaatttaaaacttttttttttcattctatcgaacccgatggaggcaaagtttaccgtactattattaagggtacttttcccctcaaactctttcatgtttacacctatatggatacctaggaatgaagctacaatggcctatcgaaattagtcaactcaacgttctaagtaatttttagagaatttggtgttaaaatgaaataagaattttgagtaattttaatctaaaacagtttgacattttttgcagcttataagttatttaaaattaaaagataaaaataagaggttcaaatttaaagtttgtaattctatatttttttaaccttaaaatttattcttaaattatttttttgctagtgttattctcgaatcttaggattttaaataaacaggaaaaaagaagaagaaatgaaagtataaaagctcctaaagttaactttattaaaatcctctattttaatattttcttcatttttcataaaagtatttaaaaaatgatttcttaaaattatatgttgatcctccttttgtttttttaaagcgaatcttaaaataagtaatattactttattctcttatttttctatgtgctggattatggctaggtggtttgaaaaaaggcaattaaattataaaaaaagggcaattaaaaatcaaaccagtatgggataaatgaaaggattaacatgtttaattttttttaattagtatgctatattagtaggaggagattgtcatgattaattaagtggcttaaatttttaatatattaagttagaattaaagatggaataagatgactaaaattgtatcttcattcatgttatgaatgatataagttaaatttgattctgtccaaaaaaaattcatttatagatttagttgtcagaagcccaaacacgaataaggaaatgctacagtgatcatccacattgttttgttttcgacaagagttggtttattttatttattattgttattattattattattattattattcagacctatttgtaataaacacgactttgtttcttttttttattattattattcatagatgcatttggaaatgctaatgcaaactttggataaattggctccgttgctaacaattgtatacgtcactttatcgaaaagaaaacaattttatacgtcaggtactttttctcttatcataattctattgttgttaaaggaatttaatggtgattatgtcatttttgtaggcttggagtgtgcgcagagctaatgaatgagttgcagaatgtttttcttgttcttgcaattatatttagttgattttatgatgattgggatgtcactccattctgagtagtggaggggtgtatcatgtatatgtagtggtgtttcttagtgaaaaatcattcatctttcgaccagtgcaaattagtaggagccacttcatgttgaaggagtgattgcagaaagaagctactcattcatcatgttgaaaaatcctgcagtaaaataaattaagttgatgaattttatttatttaattttatcaaagtaatacacatttcaaaagtccacaagagttaaccatgcatgtgtccctgaccttgggatccaagttttgaaaagaaaagtaatacgaatatgataaattggccatgagcagacactaatttacgtgaccttgtgaactatttgaccctggtccataataggttagggaccaggctaggttggatcaattcatatgacaattataataacataaaaagagatgatcataaacagacatgacaaatttatagtcatataattaaaatctataaaatataaaaaatttaatgatgatgtaatcattgtgtaaaataattttatataattatttaattataaatcacgatttgtatgattttaaatataattttataaaaattaataaatttatcatacataataatttataattaaataataaaactagctagcattctggatcatcctttcttggaaacatttcacacattttcatcaataaaagttattttgtttatgtttgataaaattaagtgttagttcgaagatgaaaaaatcagcttgtatttagtaaaattagttattagagtaacataaaatataaaataatagaaaaataataaaacggtaatttatctaaaaaaaaaagtaacaataaaaatgaataaatatataaaaaattaaagtgaaaaaatataaaaaataaaagttaacatttaaaaaaatattatttcaaatcacatataaaaatgttaaaaattattaaaaaaagcttgttaaaataaatttttaactgataaaaaaattaaaaattaattaaaatacttagtggatagaagtaacctttcctgtactatcaacatttttttcaaccagctttagtctttatataaagtcgtatataaatgaattcttagaatggaattgtggatgtgacgtcccattattacatcacctttatttttatatttttttctcaattaaaatttcattcttttttctcagtttttccataacatgcttacgatgtctccatttatcgtgaggttatgattgtgcaaacatgttagctagctttggtacacataacaaaggtaattttttttgggattcaccaccttttttatatcacaatatcttcttgggcatagaaagagtttaccttcttaaagattcaaataatttgttctccttatatgattttggtcctccaaatgttttcttcaccctttcttgtcggtatatttctggaggtgtttgtgatagtagtaaccgtgtcaatctagttggaatttatattactaatgtgatgttttatcaggctcctttttgcttaaaaaatatccaaataaaaaaaaatcaatattttctttttttatgcattttctttcatcccaaataaataaaagataaacgtttattcaactaaaactataaaattatactttttaagttgatcttaaaattttatactaaaattctcaataaacccacatttaaaatatatgtttaaaaataaaatccttcattttaaaacaattttaatagaatcaactaggatcgatccactgacgagactttgattaatatacatagagtcaaaggagtttttaatatcagtgtgattattgtagaccaattctttttaatagaatcaagtgtacatgcatttattgaaacacacgctatgattacatttaacttttctaaaatgagcattttatttggaggataaagtaattaatttcagttgttaatgagaaaatcaattattgtgttatgtgcatatattataaatatactagaatataaatagttgaattctcagtttaaaaaaattaaaattcaatagttgagttctcatcaacaattaaaattactcatcaacatttctttttctaggaagcctaaaaaagccgctaatttaatttttacacagtagttatttttacaaataatgtaaaatatattgtcaatttgtcatatcatatagtattttcatatcatctaaattgattttaaataaaattaaagaaaataaagcataaatcaactaaccaaatccttaaaacactgcatgtcccagaaacaaaaggattaataaagcattcctttggtagtcaaggttcctcactgaagagtatagtagtagtagaactttctgctttgtgtgtctgccaccatcacaaagcctaaaacccttttctgtatgaactgcatctaaattgcaggctccaaaccctccttttggactctccattccatttttccccctaaaaagaagagacaatagtaaagcatcaaagcaaacaaaagaaagagcaggcaggctccttggaatgagcaacaaactaccttatttctcggcttatttattatttcatgtgtccccacaatttggaaattaatcatccattgctaaaatttgtcaatgcttaattatatattatgcctaggtttgattttcggctgggaagccttgagttttttaatgcttatggctaggtttgattttcggttgggaagcctcaagttctttattgatttcagttgggttcaactgtaaactaagttttgctttatttttgtcttcaaatttaatttgaaatatacaaaataaattaatttttcaaaatcaatttacagaacaaaatttacttatatttaactttacaactttaatctagttaatctgggcatgtatgattatgtttagatagatgttgaaaatgtagttttaaaaattttaatatacattctcaaatttcaaaacacaataaaataaaataaaatataatgttgctttgaaaggtaagtaaaattttgaattttttttctagagtcttttttgtcaacttcaccgttacggtgtgtttgggagcacttccattcaagagtaacgcgtgtctttttgaagcattccagtgtagcttctatgctgttttgaacttttgacataaaaaatgctttatatatgcattgatgatgagaaacacacactaattttatatgtgtggatgcagttgggagaattaaaaaaatacttttacttttaagacaaaaacattttcattttgtattctatgtcttaaaattagaattaaaaaatgtgcattaaaatttccaaaatatattttaaacttttattcaaagataggctatatctccatctttagcaacgagatcatcatcatttgcagctagaaaaagaaccaattttccctatttgttgagtctcctcttagccccacatatcacaaaaaacataatagacttaaaagtatttcaatttaaagtaataatcagtttctaaacagaattatctcaga

SEQ ID NO: 253 - DNA, 5000 bp, Glycine max
  source 1..5000: mol_type = unassigned DNA
tgtggtaaaaatgatgaaaagaaaaaaaaaaagttgcgcaaagggtaacctatgatccctatccttaagatcctgttgatcaaaaggcagtccattggcggaatttgtaattatttgaaaagtaatgtcctgaataagtagtcatatgaagaactcagtttcttttccatggtaaggcatagtttgatttgaagtcattgctctcaggacaagaaactcttgcagtttcaactaattccatttattctaagtgcatcttataaatatcaaattataaagttccaattccctcttaattcatgaaattctactagagaatatcataagatgacagcaaaaagggttgcatctaaagcctccaactctgtgtacaataatcttaggaataagaaactcctcattagagaagctacccacccctccactcagtggacaaaatagatgaactgaactcctaaataactaaattgaactgtaaaaaaaagttccggcgaattgaactattatgaactagtttgaattgttctccataaccattttattttgaagcaattttttcacattttttttatctcatatattataattcagttcgattcaataaattcggtttcagagcagttcagttttttaaaacttaactatggaacagttaagtttgatttttcattcaaaacagttcagttgttttagcacagttcggttgatgaaaatgtacaatcctcgatcatattacaaataaacaaacgttcaacagcattgatagaatgtaaattgtaacacaatattaatatgattaattattttttaaaataccttttagcttgaaattattttattttgtaaggcattttgttataaaaccgataaacatcctaacatttcagtgccacaaacgcataatagcttgacatgtcagactcagaaatcaaaatctcggcatcaacaacccaatgacaaccaatacggcgtcgctttgaaattaagagaaaagctaatttaacctaatttttattagtgaaaaaattagaatccaattcaatcatcctaacacgtgggggttgtccgggcagcacgtgcccgaagaggaagaagaagaattctcgaacaaggatccgaccctaactcacattaatcacgggtcggatccaaacactaccggatccacaacccatttcgtacatgttgagaaagcatgttttattttttcctatgaagttaaggaatggttgttcttttccagcattcgaattccagttttgttgattgtgaatgaagtgaactacccatttcgtctttgaagtattatcctttctctttagtggtccttgaataaatctatgagtaattcctaaaatattgaacatttatcactttaacttagttcttaagttgatatattttagtaaaattataagttataaataagctagcttatgttcataagttaacttatttttcataatttattttaaataagttgtttgaagtagtttataaaaaataagttactaaaataatttattttgaaaaagtaatttataagctagtcaaacaagattataaacttctcaaaaaatttaccaaacatagcctagcctatatatccagtgttaatatgttagatatttttttaacatcgatttatgaattcaacacaataaaaaaagaaaatcaacaaagtattctgcatagtagcatgtttcgttataattttaatataaaaggaagtcatgacagaatataataattttaatatatatagaaaaaaatataaaaaaaatattacacaaatatatgcaacctaagccatcacccagtctaggcccaaagccgaccttgattaagtatatgtcgaaagtgaatagatcatatgtaaagataagtcttttaaatgaatctctatatgttgagatattagtctttagctttcaatcgaaaaatatcttccttaaaaaaaattgaaagatatcttggacattaaaacaatatatgagataaattgttatgtatgtttattattttattaaatttatatcaatatatattcaaatttttttgttttaaaagatattttataaactaattcttttcaagaataaaaagtaaaaagatttaaacacatataggcattatataataactgtgtttcatttaaaattaataaatataccatatttaataaatattgtaattaatatattataagtaaaattagtttaccaacaacattaaatattatattaatgtattaaaaataatacacagtcaaattataaagaatgaaaattgacaaataagttattatgtatttatatattatattatatatctcaatttttctattttaaaatatgttttatcaaagaaataattttcaaaataaataacgtgactaaatattaaaatgctaagtttattaaatatagtatatttctaaatattttaccaaaaatagtatatatttcaaatgaattagttttaatattaataaaaaaaatttaaagattatatttattaaatataatatacagtcaaattaaaaatatggtaaattttttatattcataaatataatatccttttcattaaatatataatcctttcaaaaagaattaaatataatatatttttattttaaatgtaacggttgtttacaatatataatcaaatactaatcatttgcaatatggatcatagaaacatgaagttcctctttgtaaagcttgtttctcaattgtctctagtcattctttggtcttttgccacagttattacctctcaacatgttagtgttgtgagtctaccaaacaatgaaagtgtcccagcagtgattgtgtttggggactctatagtggatacaggtaacaacaactacatcaacaccatagccaaagtcaatttcctaccatatggtaaagattttggtggaggaaatcaaccaaccgggaggttcagcaatggtttaaccccatcagacatcattggtacaaacaaaaatccttgctctctttgctcttgtataatttttttttatcaacaaatgttagttaattgttaatagtgcagattcaaacctctctgcctcccatgctcttgcaccatgttaccatatgcattataattatagtatgaacatgttcttattcaatttcttaacaaatttcctttggtttttttcagctgcaaaattgggagtcaagaagcttttgccaccttatcttgatccaaaattgcaacctcaagatctcctcacaggtgtaagctttgcatctggtggcagcggatatgatcctctaacatctaaaattgcagtaaataattgtccctaactataaccttacattcatatatcttcatttttccatagtatatcttaaagactaattataatttactttctttgtcatgtcactttagtcagtgctgtcattatcagatcaactagacaagttcagggaatacaaaaacaagataaaggaaacagttggaggaaacagaacaacaacaataatatcaaaaagcatatacatcttgtgcacaggaagtaatgacattgccaatacttactctctatcaccatttaggcgactacaatatgacattcaatcatacatagacttcatgattaaacaagccacaaacttcttgaaagtatgtgaatcacatgcccaaatatacaatttggtttagtcttttgtattagacttccatttcttagaacttatttaatatatccttgtatgatatttttacacaaaaaatattaataaaaatgaattggatgtaggaactttatggactaggagctagaaggattggagtaattggtttgccagttctagggtgtgtgccctttcaaagaacaattcaaggaggcatacacagagaatgctcagattttgaaaaccacgccgcgacgctcttcaacaacaagctctcatcccaaatagatgcccttaagaagcagtttccagagaccaaatttgtctaccttgagatttacaacccattactcaatatgattcaaaatgcaactaaatatggtaatcaaacacacctattaccattatataaattttacaagtagctagcttaatttatagttatacactttttgaatatttaacctatatgcataatttttttatgccaatgattcaacacataatataaagttgacattgcatttacagactttgataaaagaaaattagtaactaactagaaaattcaattgcatgttcttattattgtggggttgtttgtcttacaccacccataaccaacaaattagcatgaaattaaatgtccctaaagcaacaatggaataggaatctcatgtacattaattcttgactagttatccaatgcctaaagtttgattactacatttttgtttgtttgatgcattgctcattgtcatggtatttgttggtttaggttttgaagtaacagacaaaggatgttgtggcacaggagattttgaagtaggctttttgtgcaaccgtttaacgccgcacatatgttcaaacacctcaagctacatattctgggacagtttccatcctacggaagagggatataaagtgctttgttctcaggtgcttgataaaaatatcaaggacttcttctaaggctagtttcattgtaacactcctaatcagggacagggaaaaaggccccctcccccatttttttttctttctaaattttaaaaaagtaatagattattattcaattattttaacgaaatctgatttttttttattcgatatttttttctttctttaaattttaattattgtacaattaatttttatctcttaactttttaattataatataaacagtaatattttttttttaaaaaaaatcttatcccaatgttatatttttatcaaattttagttattatataaccagtttttatctcctattttttttataaaaaaaagtcttgtgttattcaattaggattttaaatgatataaacaagt

SEQ ID NO: 254 - DNA, 4200 bp, Glycine max
  source 1..4200: mol_type = unassigned DNA
tgattatgtacatcacctgctcaacgtaatattttcgtgattgtcacccttaattttgtcatttgcataactcaagaatcttcctataaatttttcaccttcactactcccttctagtatttattattgtaccccatctaaacatgtcattggatttatcctaaaataattgtagtaattaaaaaaaaagagaaaccaacgtataattttaaatctattgtttaaattcaaaagtgagaatgagaagatgttatagcaagaatggttagtataggaggacataaaactagaattaatttagttattaaaagattaaaaaaattatattaattttatttttttatccaaacctcatcatttcttattatttcttttactaacttataattttgaatgtgtttttaaaaattcacaaaattctttcaaatcttataaatttataaagtcttttcaaatccttatgatataaatccagtgttataagatcggtccgatcattgacctagtagagataataagttagtgatccaattgattgactagtaattggctcgatttaatatggtatatattaaaaattcaaaattgtatatgtatctattatatataagtatataactaaaattatttgattaaaaaaaatttatccatactccaatatctaaaataacaattgataataatgagatatcaaaatgatatcgtaaaggaggtccattttttttttttgcgtgcataatccaatctgaatttgtaaaactgggctgagtcgttagatttgactgaatcatcctagaccacatgcatgaactatccaatagtgaaattgacccaataaggccatcaagtcccgatttgaccaaccgtgccggaccgaattttataacactgtataaatcctttaaaattcaaattatcataaaagtcttgtaaataaatatgataagtcataatattcctacataatcttcaaaattcaagacttttttatgttaaaatagtcttttaaaatcataatccaatacactctcctaaatgtctcaattaaaagaatgagcagattgaaatcaccaatttgaaaaaataagaagaccaaaattacattttagcgaataacttattatgataaataatttttttcttcttctaaagtatcattaaaaaataagcatttatcaaaataatagattcatttttttaccattttgggtattttggtcatgcaaaatctgactgagaagggattgtactcatgtaattggataattcttgaacaaaaacgtatcttcattgttttttctatattttaagagaaaaaaaagttatgcactcaagatgtataaaataatcgtcattcaattataaatcataatgtataataagattgttgacttttatgataatcactttaaaagtcatattaataatgatatataattaaataataatataaaattatattactttatgatgataattaaactcttattttaaatgtattctaaaagttgatcatgatttaaaacattgaaaacacttgggagacaaccgtcatcgttgtttttctttttaatatgaatcctgacgtttaaaagacaacaaataaattaatcattacaaaacatttatgagaataattaaatggaattaaaacataacacttcctatttggtttgaatttaatagattttaagaggcttttgtttcatgaatttgattatagttccgagaataatatttctgataatgttattaatgcataaaaaaatgtttggtgcatacttatgattctcgggaatgtttttaaatttaatttaattttaaaataaaatattaaataaataaatgaagttaaataagaagaaaatgagaaattattttaaatattctaatgggaatgtacaattctcaactctttacatgagaatgcaaagatagagcaaaacaattacaatatggatgctaggaaatgagttatgtacgataatattatttgattaccttttaacaaacatggaaaacatattgtccgtgaaacaaagcctaggaaaaaagttgtaacctaggaaattaatttaatcataatcacatgttactttttcaaatattaaataataattaaggaaatttaattatttatactaaccatgttttcataatcgttaagttatttattgatttcaaactgattattcataatgctattaaattaaaattttatttacaaattaatgatactcaaattttcaaatattatgagatactatgataaacatttacttacaatttttcaaagtatattatatgttaaatttaatttatttaatgaaatattaaataatttaaaattttcaaaaaaatatagacataatctaattaataagaatattatactcctaattaagtcagctgaataaaattattagatgaaaatgaaagaaatattttcactaaaatataacttgattttcactccatttatatataaaaagagagctaagtgttgatggatgggtaaccaatgtttctcaagtaataaagttaaaatgataatccgaatgccgaattcagatgaactttgttcgtaattaggtagatgaatattttattaataaaaaaagttaaagaaaatttatttgaaaaagttatgaaaaaaatagtaatttaaattgacaaaaaattaaatcaaataagaggaaaaattaaaaaagaatttaaattaatcaattaagatagaaaaaatgaaaaaatctaatattattgtagaagaaaatttaaaagatgaatgttgaaaacttagcctaagcctactagagttactcaatgttaatgattttttttctatttataattattcaaatttacacctgcatctaattttggtcccgacatgaaaggacctaattcatcagtcttttctcccaaatctctttacaaagctaaaatgctaaaatagtaaatacaaatgcatgatcaaatcataatcaataatcttaaatacaagaaaagataatgtaaatgtaatattattaaataatattaaccacaagaaaagataatacaaatataatattattaaatagataaaaggaattatattctcttagaatttttataaggaatatataatttcaaatatgaaaattaaaatatagtaaaaataatatacataataattattaaattaattttagtgtattatcatttttatactataaatttaaaatttaaataataaattattttatttttaaaaaaaataaagatgcataagtataaagcttcatttatcgtgttaatattatactatattgcgtatgtgtttcaacattcaacatgttttttgtgaggccactgattgtgcgggtgtgttgccaagaaaggggcttctttgaataaccactgatcatccttctgtgatgtccttttttctgccgcacttgttgtctactatatagttggaagttggaacaatgcatattaagatgtagttttcattttttttttttattgttgttactgcttgcgctattaaatataagagtgttttaactaatttgattttttaaataattaatttagttaaaaacattaaatttattaaccattaatattgttttcctaaaattttctttaaaaaattttcagactcatcatcttacttttttcatttaattattttttacttaattaattaataaatgttcgctagctttcttctctaatccttagtccttatcagaaatagaataagtttatcttaatgatttagaatttattgtaaagtaatcacgatattttgttaaaaaaaataattaatacaaaaaatgaaaaaaaattaataaaaaaaaacttatatctaagaagaaggtagtgttaaactactgaatgagtaaaaaaaatactatcaataaatgtattatttattcataatatattatatgtaataaatatcataaataatacatgataagtaaagtataccgtccaaaaacattaaatactatattaaattttttcggattcaaaatactactatattcaaactatatttattaaatataatagtaatcaaaatattaaatataaaaattaagaaataaattattatatgagtgatacccgactcttatctattaaaaaagttttaagtttgaaatgaaaagataattgattgagggggatctttcactcaaagat

SEQ ID NO: 255 - DNA, 6373 bp, Glycine max
  source 1..6373: mol_type = unassigned DNA
aaaggaacggagtgaagtaccgaagaagggcgaactggcgtgtctttggcgaagggaagaaacgcgatcggctggttggtgagtgcgtttggaaggaaatttggagtcgagaacggtgaaggtagtggaatcatgctgcatgagttgcgttgattgaacaaatgggaaggagacattggaacactgaaaaccctaacatgtttggattggatttggattgggattggaaggggtgaggctaaggaggaagatggcagataggaagaaaaaatatggttggcaccccgcgtcttttatacactttctcaattcttcttctccttctttttttaaaaaaaataataataaacaaaatgaaaagaaaaatagttccaactagttgctaacccattatccaatcgctttccttaatcatttcaattattatgtgtcaaatggactagatcttttttcaattaaagtaaatccatctcatttattatgctggttccaactttcaattccatgtttttagctttcaataaataaaaacaaatgtgagaagtccaggtcagaaaattagtatccatatccaaaagaattaaatttgtgaaaatatatcagggttggaaaattaagggtcataattttggtgattatcaataaataaaaatatttttaaaattttaaaaattgataattattcaatcatttatttaatgaagaaaacattaaatatttttttaggtgttaaacacatttatttttcacacaaagaaagagaaaaaagattacgcgctagtagtgcagcgcatctgattcaggttaaggggcgatgagggcaggtcaggggtgagtcgaccataggtatcatcccgatgttcattgctatatcatcatttgctctgttatactcaatggacgagatactagtagatcccgtcattcctatcaaagctattggacatcaatggtatccgacttatgagtattcaaattataacattttcgatgaatcgtcactctcccttaccttctgcctgaactaatagaagttggcttgaattttatttatcaaaatggtattgttttgtaagttttttcatattgaattgaggttgaaaaatcatttttgatttgtccatgaaagcgtctattcaggaaaggatcatatgtttttgttcattttttaaatcatgacatgaattttatttccataaatatggatataaaacaaaaaaaaaaaaaatcactttttttttcttcttaccctagtgtataaagttttacacatttatttaatcataatttttatcatatatgataagtttgttaatttttaaaataattattttaaagtaatttaaacaataatatgagattctcgttgcataagcatttaactttaaaaaaatacatttagcatttaataaaatgtggggagaattaataagaagatattgggtacaaaattagtcttatttataatagggctggtttggagatattttcattttttaaataataaaacgaaatatgatagattcgcttcaaagatttttcgagtttaatatcaacttaaattaagaagccagttcttgattaattgaataaactgacagctactgatctgttttaaggtacgtactactataagaatttaattttgatcaattatcagtataaaattacaatttttccagtctagcactgaattattggttaaagattttatttactattcagtaaccaaccgttgttgaaagtgagatatgtgtgactgaaactaaaaaaactagagttatgctggcattggttaatgatatggaaacggatgcaacagggtgctgagtgcagaaaactcttgaaagttgcggaaaatgggggaatctgttgttgctgttggaagaaaacgagggttgtgaagggacaggagttaatttcatgcttccaaggtgacaatacgtcgtgcttatgcaaggtatttgctattgctatacataataaaatgataaatcaattaccttatcatgtgaaccaaggaataatgatcgatgctcatggtaatttagtctacacgacataaaaaaaaaaccctcatgtcacgctttttattattatttgtacacaaagtttgcatgaataaagttaatttcacgttgacattgtaaagtcatcattctattctatatatatgtgatataaaagaatgtttcaaatctgccacttcaagcggaaccccggtcttcaaaactacaagcttatcacctaaagtcaaagttagcaatgaaatgaagtcaaaaaaattggtgttataaacaacagcctgcatgcgatacttcctgtatatcatgaaggaactcatacattaaccattcttgaacagactctttcaaaatttcgtcactgcgaatctaagaaaaattatatttttattcttctgatattctgattgtgtaattttagatttttaattctaattgcgctaattaggatcttcaagttttgtcccattcataatcgggtccttttaaagaatgcttgatggaaggttgaggcactccaagattgttcctcaaaacctttgtttggagtcaaaaccaactcaaaaatccatttcagaaacaaaaattgtaactaaacaaagtgaagaccagtccattagtcagtcgcttagcatcaagtccaagaggcaccaagacaatgttgtaattttaatatttatttaaaaagaatctttttaaaagatttaattaaatatacaataaaagttatgatatttaaatttcaaaatttgaaattcaaatcttttacaattaagcaatcaattatatttcctattaatgtcaataaaagtgaaaattaagagagagacaatcacaattatagacttataattggtgataaaaaagattggctaactgtatttgaaagtgattttaaaaggtgatgaaacaattgttttgtcttttctctttgtttctattaatctctttctttctttactcttggtttttctttgctagttccccgttaaggtgttcttgttgcatcataggaggtgtgggttaagacgttcttgttgcatcttgggaggtgtgaaatactgtagataaaccttattaatcagtgaccgtcatgcctcagagaattcaatcacgtactccacttaatttttttacttcagcaacaacatacaatagtatccaagtcattaatgtacatcatcagcattaattaatcaaatcaaggttttctcctatttggagcttggggagcatatattcctgttaattatatatgaaggatgggcaagaacagtttcacatttgctatagaacaacaatccaatacagataacattctctctaataataattaataaagatcaaattaacgcgaggcacataatccataaaatgtctaaacctcaaatatatttgttattgcttattcaatgatttttcattagtttcaattttggtagtatcagccatatggtaaggtaaacttgaacaacataattatataccagaagagcttaattaaatgctaacacaattcaatgaaatttgatttgatagaaatatactacagtaattagtcccctgcacatgctttagcatgccacagaagatgcttgcaaacaacattaaagctggacattttacaagcactgaaaaagagatttcgtgagatcaatctcacttcttgccagcctctattctggattcccactttgctctcttgaaattgataagcacatgggtagcgaagacaaaagatgctttcacatgatcaagccccatatccttttagccaacttgacattttccacaaaatttgaatgtttcttaaatgggaacccggagatggaagtttgaggcacaccagagtctcccaaaacattaatgttaggaaccaaattatctataacatttaacatatttcgaagtttagactttagaatacaaatacttctccaacaacagactaaagagcacaagtagatattcactctgcattttattagctggctgccttataccaacaaaaaaatttatgatttatttatggcatcagataaaatattgtgccctgcactataccaacttagactactatagtacacgtgctttaacgcatgtcatgtttgttgttgtgaacatttgaaaaacactcttacatacacaattaattaaagttatatactaagtttgttagagtttgaaaaacactcgtaggaccctaactcaagtaaaaatctattttaaaaaataaaattaataattactatcataaaagaagttaaaagacttaaagatgatatgggattccaaacaaacgatatttgtttttaactatttatttaatattattttgatattattgtttatctcctaagaacgtgaaatgaacatctaaataattcatgtctagaaatataatgatatcatttagtcttgtttatgcatttttattcttaaaaaagcaaattatttgatgtagctcttaagggattaaatgtgaaatgaggtaatttagactctttcaaatgagggattatggttagggtaagttagtggataaaggtaataatcaaaataactttaaatagtggaagattcttaatgttgcattaagagtagtttcagtaagcttagtcccaacacattctgtaatagtgcttcaaccgacagctcatcccgagtgtgtgtgttctatctctttgatgttgtgttctgcttaattatttttatttatgttaaattttacattttcgtatcattattcgaccaatatcgaatttaattaatcaattctttaaaattagacatatacaaactctgagaacaatcaaagtttttatgaactcgatattcgatcatatcattttaaaatattacttggatgaattagtagatttgtcaaagagttaacaaaaacttatttaaaaataaaattaataattatcatcataaaagaagtaaagacggtatgagaattcaatcgaacgatatttgtttctaagagacaaatgatataaagtgtaattataaaaaactttgccagcacaatatatttagtcttgtatttggaaagtatttctatcaaatttataattaatctattatttattattgtgataacttctaatatttttttattcataaaaatagaagataatattaaaaatttatacagaaatcactcggacaccttagtttaccaactaagttaaaaaaaaactaagttaaattccttttacttccaacttctacctaatactaggaaaagagaataatgcaattcccaaatttatagcaatgctgactttctaatgactattaatagaagtgttatcatcacatttttttttctttagaattacacttgtaaacatatcttagcttttttaattctaagctctcaatataggtaggtagatagcatatggctttagtattttaccatgaacatggtatcatacaaaaagtgtaatgacatgtacaagaagaatttaagtcaaaatagcagaaattttgcacttccaaaatcacgaaacttaactaggtgagtgagatgatagacctatggaacaaacataaaacaggtttaggtaagatactttaattagttagtttctttcaaagctggaatgcataaattaattttaagagaaaaaactcgatttaatttatttttattttgttttttagaagagatgtttaggaggaggttaaatagttatcttaaattgtagatcgtaagacggaggaaatctaagtctacttatctttaatttaatttctagggattaaaaaattaaaacttgtttacttaccaagtgaatcccttccccttgattagctagctaattcttaggtacaaaatagaagaaatagaaagaggaggataagcataaaaatgatggaattggtgtgtgtgaaggaagaaatggcaaaattagagtcagcagtgataatagcgatgaagggacacccaggcagcgggaaaagcacgttggcaaagtccatagcctcatctctccgaatccctctgttagacaaagacgatgtcaaagattgcacccaacccttgctgctaacctcacccgccacactcctcaacgacctctcatacgacgccatctggcacatcgcctccacgcagctccgcctcggcctcagcgtcctcctcgactccccgctctcccgccgcgcccacctcgatcgcctccttcacctcgccgcctccgcctccgcccgcctcctcgtcatcgagtgcaggcccggcaaccaccgcgagtggcgtcggaggctggaggcgcgcggtggaggtggaggtggacacaagcctggcacgtgggaggaactggagacccttctggaag

SEQ ID NO: 256 - DNA, 5924 bp, Glycine max
  source 1..5924: mol_type = unassigned DNA
attagtgccttggtagccctacctttggcggtcttgaagttgtaattggtgttggtggtcctgcctttggtggctttgaagttgtaattagtggcattgcctttgacagtcttgaacttgtaattggtgttggtggccctaaagttgcaattgatgtggacggtcctgcctttggtggtcctgaagttgtaattagtgttggcagccttacctttggcagtcctgaagctgtaattggtgttggcggctctgcctttggtggtcctgaaattgtaattggtgttggtggtcctgaagttgtaattagggcctttggtggccttgcctttggcggtcctgaacttgtaattggtgttggtgttggggattctacctttagtggtcttgaagttgtaattggtgcccttgacgatcctatctttggcggtcctaaaattgtaattggtgttggcaaccttccctttggtgttcctgaagttgtatttggtgatggtggtcctaaagttgtaattggtggtcctgaaattataattagtgcctttggtggtcctaaaggtgtaactagtggttctaactctaaagttgtaactataataataaatacaactaatagagttaaaaaatctacaaacactttcttcattttgcaaagctagtttctatctcaataaactttttaagagacattggccaccttgatgactgaaggtgtggttatgaaaaattgacttcttattattatttttacttggagtgtgtcacataaaatggcaaagtattgcttgtattttgttcattttcttatgttgctttaatgactttaaattgtgatggcatcaaactttgtgtttgttcatgcatttaagttcttgcatttatttttacaaaacatatactaaaatatacttctttcattccaaaatataaatcattttagagaaaaataatttaaaatataagtcattttacaaaccaatattacaataaatagtttttccaaaattaccttcaatcaacatttcatgcattaatacagtattctttttaattatcgtgaactatttttcctaaatcactaatatttactcatgcattcatatcattaattaattaaaaaaatcacttatttttccacaagtaacacttaatacaatggagttaggtgaaatgaaaaggtcttaattcatcatgtttgtataggaatttgttattatttatgagaattatgtgtactgagaataaatgaataagaacactatttaattagagataaaagagtatattaggaaatcactaatattttttatgaaattaaataaataaattatttttcaatacatgtgcaagaactttaaatgacttatattttgaaatgaaaggagtaaattgtaaaaaacactaaaaataaattataaattataattttttttatcaatataaaaatttaaatttatctttatctaatgttatccatattaattttttatttttctcaaactatactaaaatggtgggggaaactttcttaatactacaaaaaattgaaattcttcttatctagttctattcacatgatttttattattattattttaaattataataaacaaataattaataaattaaaaaagtgaattttgtccttccaatacttttatttaaatttcagagtgcattgcttttaatatttattttttatagttttattcaaaatatcaactatatataaaagatattcaaacatatctgtttaatcacaaactttattgtcatattaaaagtcatttaacaatgaacgtgagttattataattttttcaattgatttgtgaactagcatttattttttaattagatccttaccaagacctaattaaaaagcaaataaatttcaaagatcctgtttttttagacctaattaaaagcaagtaaagttaaaaaactcatttttgaaaaaaatatgctagtgatttaatcataaattgtgaaatagttaaggggcttgtaaattaatttaaccttcaatttattcaatatttattaatttgaaaataaaatactcattctaattattattataaggtccaaattaaaattgtgatttaatatttttttaaagttcaatctacattatcctttatatttattatttttcacaaaaatatccttcaataaaactagttctagaataatgtgacggtgagagaaacataacatattattgttatttagtttttgtttaaggatagttttaaaacaatatactacctacatctaaaaataagtattatttagaacaaaaattatcccaaaacatgtgtggcatttgacttttcaatgtaacaatattaattgctcttttccattaatacccctaataaatgttacttagcttttgaattcaatattactcttttcatttctatataagacccaatcatctcatttataagattaagaaaaatggttaatttagtttatagcaataaatttatcctaaatttataacttttcaaaactatctttgtcattaatatttttatcttttctaattttttgtcaacaaattctctatcttcttttaataagaaatatttttagtataaaaataattaatacaagtaacattatacatttaatcttataaaaaagaacaaacattatttcaaactagaatcttataaataggaatagaggaagtaatattattcttttgagtttatttaataagatttttttttataaaactatcactttcttttttctttcatctatttattattttttaatgtttattttagaatagaaggagtattaatttaaaacaaattctctaaattaaaataagtaaaatcctcaattctaataaattatttaattagacgttttaataataacaaaataaagtaaaataattgatatattcaatgatttttaattttacaataatttttttttatgtttattacgatgcactacttgaaagtgaaaaaaagtagtttgtattcaattcaattaattgagatttttaatgatctttagttgagaataaaataattgttatatttaagtctcataaatgaaaaaatatatatttcaatttcttttatatataaattgtcatattttttgcaccaaaagatgtgagaaactaattgcgtaataaattctaacgcaatcgcaattcaaaatcattaaaaattaaatacatgttcatggattcaattaaaaaaaatttaagaacttaattataagttattcctatcacctgcaaattaatataaccttcaatttattcaacaaatctttttttacacgcaatgactcttgttgaaaataaaatagtaaatcactagtaattaatatattcaatagttcttgattttagaataaaacaattttatgtttattactactaagttgcactactccaaagtcaaaaagtagttccgttcatttaattgagatattcaatggtatttaatttaagaataaaataattgttatatttaagtttcataaatgaaaaaaataaaatattgatttttttaaaagataaattgtcatttttttccaccaacgattacagatgtgagaaattaaatgcctaaaacaaacataaattctagtggtatcacaattgagagccattaaaccaaaaaaggggtataaataaaatacaacctatacttaccatttcctgtggtctatcctaaaccacactcgaagtaaaaaaaaaaactcaaaattcataaccactgctcacatcatcaaggttgacaaatgtatcacatttgtaggtatgtaatgaatatctctccctcaacctttcatccatctacatcaaaacacaagcaaatcctagaaattaagttcattgagaaatagaaactatcttgacaaaatgaaaagaagtattaatttgtaccattcttaactctgcaagttgtattaatccttacaattatggttgcagatccagcagggaagggctacaaatgtgaaaaggcaaaaagctcactaaagccatgcatagaatacccccgtcaaattaatcgatgcattatattttcaatttttcagaaatttgtgattgtgatttttgcttgtttgtggcattcttgattgactttgttttatctcccttgattgtgatttttgctcgaggacaagcaaaacttgcttgaataagtttgatgcattccattttaattaattaaattagtgcaataacttttgtcacacaggaatattaaatttatcatctatacctcttatatattattatgaattatgatttttgatgtatatctattatttttaattttatgtttgcatatttcaatctaagtatgcacttaaccttcaatagacttatttttctttatcacagtgtcatttgttgattttgtcaggaaaagtgtgttaaaaatggtttctttgaaaacatataggtggagccatggaggaatgatgttccaatccaagataagaaaaatctttggagtgaaaacttaaacttgtgacggttagatcccatcttattactcctcaataaactcattgagatcagtgtattaaaaagtgtggtataaatatttctcatctttttatttaattttaatatttactcatttttagaagtagatattgataatcaccagtcataaatttcaaaattgagtcctaatttgactgcaagtaaacttgcattggaacagaccaaacttgacaagtctttgggggttggaggcagaaaagaaaaccaaaaccatagtatccaatgagtatctatgtacgaagcgtagaaacgttccgtattttccttcgtcgttaccatttcgtataatagcacaacacataccatgccatggatcaattattaccagtcactgtgcattattgttgttgagtagtaacatagccattacccatttctctgtctctctctctctctctcacacacacacacacacatcacattctccgcctcttccactgaaatcccacatgaatgtcactctcacttcactcgtctctctcccccaatccctctaattccactgtttagctccgtttcggtgagatctgggaagctagggtttgaacttcaggttcgcaattagggttggattcgagcgtgttatgagagcaaggaggttcgggtgttgcattggaagtggctttggatgatggtgttctgtgggtagcttcaatttttggggtggggggtgggcaggctacgcaataggatcatttctgattcacaggggcatgcaaaatttgcgacttttatgacaataatcataatgcttttattcaacttggggtgcttcagtttttgctaagtttggaacttcacctattgttatagctccaagcatgaagctctcttcttctggatttaatcctccggctgaagaagaaggtagcagtagcagtagcttctttgattctttcattttgtgcaaattgctttgtattttgctgcccccactttttgaaaatttctcatgtattgtctttaccttggtttgttggtgtagttgtgttttttgtgtttgaagttttttttgcctttgcatgggtttggagggagggggataaggatactctagtagtactttacttgtcggtgtttgtttggcattattattatatggcatggagtgaggttgaacaagttgccgtagtttgtttttgtttgtttttaatatgtatttatgtctgggtcaacttcttagtgtcatgtcgatttgatttgtgtttgatttgtttcaacttcttatgtgtgggtggtgctaagtttgctggtgtgtgcagtttatgattttaagtttgagatgacaaggttgtattgtgtgttactattcatgtgtggttattctgtttgcctgtttgtttgtgtggttggagctcggattg

SEQ ID NO: 257 - DNA, 9635 bp, Glycine max
  source 1..9635: mol_type = unassigned DNA
caaatcatccgcggaggcatctctaagtttgatgaattcgttgagtctatctaatccgtgttttgagctttaaaaatgtgttgatttttaatctaataacccaactaattaatttaatattcacaatttaagggcactaatatttcaaaatcagtaggtgttagtttggtgcttttcaactaatattgattggttctcaaaacgaaagtctgtgcaagtcactcaaagccataagttcccgtcgtcataggctgatattaatcgaacccacgttgtcggtttaagaccaagcttgtgactttcacgtgtcaatttgctgctttttatttatttatatttagtcagatgtcaaattgcatatctattaataaattccttatttcggaaaaacaaggagaaaatataatgtgaatgcgattataatttttaaataattttgtaatttgaactaataaataactaaaatgggaacaataactataattgttcaaagttcacatgtgatacagatctgtgtaacctatcctcaaggagctaaagagctgactttttacattgtcaatagaacacctgagaaacaatcgtaatttaattacgtgcagaaatgtatagttttaaagaagaaaagttcttatacgttcatatttcatgttcttttttcattgactaagttgtaacaaggggggaggaagaagatataaattccacatctaagaagagataaattaaagataaaatgaatgctactagtgtcaagttgataaacaaactaaaatgaatttcattacttatgctcacgagaaagaaaaaaacaaattaaacatagaaaataaacaggtcaagagaaccaagttgattttatgtttttcaatagatcgatactttttcttctttccctctcctacctgacccttccctaagtaaattgacggaaaatgataacataaaaatatgatacatatacattttctgcgactataattatcgttaaaaaaaaaactactgtacgtaattgtggaaaatgtttataacaatgtaaaaggccaatatatacaaatttctatttgtgtacgtactcctgtgtaagacttctaattttgtagaatacttcgaaagttccaataatagttacgtctttcttgtagattagggcatgtgactgcaaagtacaaacaatgcggcagttggaaactttattattttattaagacagatgacaagtgaagactagtagtggtggtggcctttttgcactagtaaagaaatgaaaattttcatttttctaatatgatttggacacatgataaatttatcctttttgggcattaatcattgttcttatataattgaatattccaggacagtccaaaaccgttttttaggacaaattgtatccttgactccctaccgtgttaatttatagtttttctattcttttctttttctttttgttttgggtagttgtgctatgatgaacatataagagtggaaaaatacatagtgctccaactcgggggagttttcaattttaatattataagactgcatgataaatgtggttcattacttgctaatatagaattttgtagtctttattcttgtcatcatcatattatatggaaaattaaatattaactaaatgttataattaaaatattttaaaaggtgcaatataaaatattcttacaccaatatcgtatttacaaaattaaaaatttcgaatttacttaaaaaaacaaataaatttaagataccataccggccttaataaaattgttgacaacttgatatactgatgtttgacgactaaaggctttactttaatttttacaaattctactcctataaattgaacttgtactatttttttgtttattaaaaatatttttctgttagctagagattaattttttagaataattgttatacatatggtgtaaaaagttttacacgataattcaattacattttcctatatataataagattattaattttttaaaataattattttaatttaatttaaacgataatttgtgattggataaaaataatgtaaaattatttttacattatcattatatggacattaaagagaaatatgaaatcattaaagtaactagtttatttctttcaataaaatctgttttatacaaacaacctatatcaatacactttaaaatattggcattcataatgaaatcctcgagaatgaccaataatagattctatgaaaaatagaatcttatgaatttattttgagaccaataaaaaatgtttaggatattgaccttctttctttttttgtgaaaacattgatttgagacttgacgtacgtctctcttttttccttatgttttaatagtattatcgtacaaatgttaatataacgtgcccattattacaagaggagtgcaagttacatattttttttaacatttgtactttttttctatttatcaaaattaaaaattataaaattatgaaattatgagtgagatacattaaataaataaaaagtaggaacacataaaaaaataaaacctttacaattttataatttttaataaatttcaattaacattagcgagtatgtttgcatttctcttattataaatatgcattcactaattataaataattatatattaaacttacaaacaattgtgtttaaatttggatatcaaaaacaaaatatgtgctggattaaggtttctgaagccaaatgttaacaagtttcacggcgtcttaacacgtaggttagtttttttttaatgagcatggattacagtgcaaataatataaatgtttgaatactctcagcttgagtgtcacgtgattcatacttgtgcagaatttatagtgttaatttctttgtagctatctgcatatacaagtagccaattcaaatctcaaatctgtatatatatgtaatggaggagtgtacacaattggccgttcttcagttcttgtatataagagatgcataaattgataaatataaatgctattgtacttgtacatgttccttaaatatatgactagaatttgatggcttctgtgtttccgtgcatgcataaggtaagcaataatttttagtttttttttacgcaagaatttttagttaatagaggtggaaataagttaattaacctaagttatgttttacaagactcgagtttgatttacattccaaatcacagattctaacttgatctatttatttaataaaaaatgtttgccagaatctcattcttgctatcattctttgacatgtatatgggttgggtattccttgtgcccatttatatatatcattctttttcgcaaataaaaaaaaaaccatcaaatctttcttaaaatgacaatataggttaggttagaggtgtttaacaatcaaaacaataattaggtacaatcaaaccttgcttaaaatgataatgtacactaagtaaaaagtttagaatgacagatggatagactatttcaattcaaacatgataaaaacttggacaatgttatcaaagactctaatatatgtctaaattaaaataccaattcaattatataaatcaaacactattttaaaaaaaaatagatatcccaaatggcataatacatgtctcaaacaacactaacaattacttaaattacatatataataaatatgtatacaatattaagtgaggagtctgggtaaataaatttgaaacttattaacctcacaaacaacttaacctaattataattaggtcaattgaaattatatttgacaagacatctaattaatttttaatttttttcttattgaaaaatttatttgattatttaattaaaaagttttttttagtagtttatagtattttttaaagtaatattttttaaaatattagtttttaactttttatattttcttttttttatccttaatatatttatcaaatttcatgtttatcttttttaaataaatcaaaattttattattttttaatcattttacattttttatctattttaacaactaattttatcatatttataatttaataaattaatttttcaatttttaacaaatttttcaattaattttgtcgaaagataaactgacttgatgagcgaattcaacttacataaatgtttttttatgaataaatactaataattagtatattatattagtggaaagatttaaatttacgaccactttgctccaaccctatagaaatgttattactagtattagctagttaatcaaatttacaggtcaatacaccccctaatttgtgacaatcatttggtagatcaacaattacaaaacttgcgcattactcaatctgtttagcttaaaccttgggcaataaagggataataaattctaagtagttttgaaaagagtacacagatgttaactgtcaagtgactttcttctgtatagatattttattttaaaaaaaataaaataaagcgttgaggttagttgcacaattcttgaaattggcatgtctagacgactgtttaaagtttttttgtttcttgattttctcaactagtggcgataaaaaattgttttgaaagaaatgatagtagtttaagtgtaatttactgatcttcttttgctccaaaatataattgtcgttttattcatcgtcaccatgattaagaaaatattagacaaaagaaacttcaacttggtaactctagcatttgcaacaagaaatgaaaaattataaattaattaaccatttaaaaattgaagaaagagaattacagataacaaaatttgaagaaaaattatttcccgtgtaccaaatttatttttttaagaaaaacaccaccccaaagaaagtctttaaacatttaatcaaccaaaatttgaagatgatcaaagaaatagattttcgccttgaaaaaaaaaaaactattgacaatttgcctttgcgcaatttcctcaactttggtggttgatttgtgatgccctcttccaaaatccaaacagttaatttctctctttgggtccgtcgaatcgaatcaaatcaatcagtgagataacttcaaataaatacgatgataggcatcagatttgtcatcaaaagacaagaaattaccaaacaaaagcaaacaaaaaatagttgagctgacatgggtggccacagtctcaagtctcaaccactgtagctaccaacaaattaaggctcaaaatttaataagtatctagctatatatttgtcttgattgatgatgcgcttcaaaaaattaacacttaggatgcaaggcagaattttaaacgagactttttttaattaatgttatgtgtttttttttccaagaactaaaatttgaaataattgtgcgcctactatatcagtcatcatatatatatctttgtcattcttagtttaatattttttttttttggttattacattatatactgttacaagctcaagtgtgttgatatggataggatagctgtatcttaggtactgtaacaaaaagtattgtttattttagtatttagtggcctataacaattttgtccttaaaaattatctttgataaattaaaaaatagtatttatgaattattacttttgatctttttctaagctcaaagttgactgacatttttttagagatatcacatgtaaaatattattagcttcaatgtttgatggtctgtgacagttttattcatacctcaataaatcaagagataagcgtctataaattatcttccaccttaggtgatataagatttttagtgtacctaaacatgtacattaaagatatagtttaccttttgatagaataaaatattatcattttcacgtgaagatgaattttgataattaaattttgggtaaaatgactacatgttcaagatattgtttttgcattcttaattatcaacgacgaggtacttctcatgctgtcaggtttttgttgtcaaatgtagcagttaccacttttcaacattcttagttaacaactctttactaaatgccatcgtcaaaacacatagttatatatgtacatatataattcgccgataaaaataatgtacatagttcaaaacaagtccttatccaagtcacaataatcgttggcacgtatatttatttatttataactactaagaatggtaaaacttgccatcgcatactgttttgccaaagttcttattaggtggtttttaactttttatatgatgcacttgatcaatagataattgttcagtcaaagaaagggaaattaatgaacaaattaaagataataaattttataagcatacttactatgaccacatacttatccgtttccacagtatatatatatctatgtatattggttctcctccatcatcagcaatgacaatgaaactatattgaaatatatcccctttgttcattgaaaagttgaaaaactcttaattttgatcgtatgaacatcattaccatcgttgtcaatttcatcattagtctcaacctctcagccgttataaacatcatgcagccgcagtttctctttctcttcatattcatgaaggaaaaaaaaagtgctttgtgggatgatactaaatataattaaacttttcacttgggcaaatttgaatttgtctgattgagcaatttgcaggagcattcttaactaggtccccattcaatttttcccatgtctaatacaagtcaattagaaacaatttagcatgtcatctttagacaaagcaatgatgatgttgctagattaatagactaaaatccctgtggccaaattgtggatcgttcttgctaccttcttgatggggataatggggattctcttatcacataaaccatttttccatggagttcaatggggtggcttgtgtttaagcattcgatttcatatatttttgggtttggttagcattatgctttgagttatcctaatatcggtttttttttatttaattagttatcctaatattgtttgatgtctaatgaacttataactattttgataattaataatacatatgttttttaatttacaataattcattatgcttaactaggtgaagtaaattcattgctagtataatatgtgaatatagttgttgatatatataattggtattagaatatatatggttcaacaatcaacatcctttagtttttaatataattatacttgtaatatttaaatttatatgtcatcaaactatggaatcgatgaacacattcttaatcattatcatgtatcaacagatgacccgatagggttaggatctacaaaaatgaccttataaaatattatattagcttcagcctctcatgtgaacccctacaacatatcaaaattataatcctaattggctgtagttgttacgacagtcacatatatatgcttagattttattttaagaattacgtacattgaatttataaaatataaacaatatactctttatattttaagcaatttataaactaaacattttcaggtacttccattttcagacacatattttttaagcaatacaaaattaaattaacattaaatatttacagacatatagcaatgcttatatcatccaacacaacagtaagcagattaagctgaatggatcatatatacccctcctatgtattctggtcataatccatttgtcgttgcttgtttattttttcggctgatacattattgtggttgcttctaatttgaaggcttttgaatacttcaattcatcatgatatcatcccactcaacaaactacaggtccatatacattccggatcatgattcgtgcgtgcacgaatctcaccattcaaacgggcataatgatgaaaagctgacattgatcattcctttttgctaatatgattattaataatataaagttgggtgtctgcgctagttaatttgttgtgtgaaatggaatatggtttggtattttgtttaaacttgaaggaaaaggtgaattgatccattctttaaaaggaagatttagtcattacaatgcatcattcctgtgcttcaaattataatctggtccaagcaaatggaaggcagacaaagaaagcaaagccaaaacatagcatcatttattcacttttattacatttttttatatctatttatcaaatggtttgggaattaggatagagttgttaaatgggctgagccaattctactcagtgaactaagtatggaaaactagctgatatggcttgacccaaatttttcacgaactatttttctggcctgatttaattcgttggcccgttgagctggatcaaattgatagttttttttgtctatatatatatatatatatattatataaataaataatatcaagccgaataagccttaatagttttcaaaatagtattttacagactcaaactggttaggactgaaacttcatgcactctacaaattttctaccaagactcactttcattacgggaggggtaaacggtaattctgaatgtatgtttacattctagattacctttttatgtaataaagagggtgttggcaaaaaaaattagagtataggaagaaactccccctagctagtttttacgcctctagccaggcccgcatcaagcaggacttgttaagagcctttatcttaagtttaaacattaaaaatttcattttgcttgcatgaataaaaaaacaaaactacaaccaaaattttgatggttaacattaaatttatagacgagttattttatttttatgattattatgagttattgcatcttacaaaataatatagaactgcaattaaatcatcatcattattatgataaccataaatagattttatttatattttaaatagttttgcgatgcaacaaattatgaattagattataaattgcataattttttgtagacaaaatttaccatgataacttttagtataacaattacatcgatgaaactttaatatttgaaaaaagtaaagttatgatagttataattttgcctatataaatcatactcatgaaggtaacactatataattcaatagttagatagataaaatcttaacttccatagtgtacatagtacgcgcattttatcataatctcaaccgttggttacaattgcactttattcttaaaagtgcacagctttatttcacagaggaattaaatccatctttctaagacagcctgtggtagctcattagaactcagtagcatgatgttgttatgccagtgtcaagagtctcaaagacaacacacaccatctactgctggcatgtgtacagcttgcaaatgtgttaaagaaagtgctacctgatttttgcttatgtaatgatgttgctgaattttctcataccaagtgtggacttcaatttcaaacagtatccccatctcccgaaacatcaaatgtgaagagtatagtatgtatattgcaaatgatatgatgggcaaccataccacaaaagctaaccgttgtagttggagagtccaaagccatataaacctcatattagaatctcataatttcaatgtaggactcaagttccataccttgaatttggatcccaatattccaccacactaaacaggccacagcccctgcctgcgcccatgtgggttggatatgcactagctccggtcaaacacagtg

SEQ ID NO: 258 - DNA, 5311 bp, Glycine max
  source 1..5311: mol_type = unassigned DNA
atgatgtgaccacttggcgtaatttctgtgctttaaaataataacattcatgactgaaaaagtaggaaatcattttattttgatatttctttctgattattattagcattttagtattagtttgaaattgaattgaagacatgatgagaatgattacatgtattaaaggattgaaccgtttagtgaatggtgacttcttctcaaaacaagaaataataaagatactgctctttttaagagtttctaaatcagaggtccatacttatcattctaatcatatttatcatttttaaagaaaaatatataaaatataattatatctatagtttgaattgaaatattttataagctaaatatatttgttgaatataaagaatattccaccccattagtatttaatacatgtattaattttaaaaaaacacaatattctaattatttgatttgatattaaaagtataagttaaaaatgtacccagaaaattatgaattaaaaaacaattaatttgaaagagtattgatttttttttataaaagcattatatatcatatatttgaaagtttaattttatattttagtatgaaattatgaaaatatatactgttatttaataataatagtaaacttaaagatgcctaatatttaataaactatctactaaaataagtaaacatttaatatttagcatgttaaacacgcctaatatttaataaaatactattaaccaaaataagcaaacatttattattagcatgttaataaaaacacacaaatatttagcatgttagacacgtctaatatatttgaagttaaacgcgcttttgaattagttttgctaaagtcaattacaaatgataattgagaaattaataaaaataaaataaaatgcttagatgagttgatttctaactaatttaaaaagtgaataatagaccagttgattagattgtagatgtctagtattttaactaattttcacattaggaaatgcagtggaggcacagattacagaatatagtggaagtgggtacagtacaccatcaatttgttggtctgaatgctgctctgattggtggatctgaatctactgatcactcacaccataaaagtgaaaactatttgataaaggaaaagcctgcaaccttcctatcttttccctcacaccaaaatgtatcattcaaattttaaatataaaataaaataacgaactacacatcagatgtcgacatactatgggtgccatgattctcttttaaaatattacttgcagctaatattcactcaaatttatattttatagatttttagatagcatcacttaattacactctgttttctttaagaaattaattacactctgtttgcgaagtaagaaatggtgcaagttcctgtaaaaaagaaaaagaaacggagtaaataaaaataggatagatttttttatattgttttgtctaagagaaataccaagaaaattgaaaacaaaaatattatcagattttttaattgaatagaaagagaagaaaaaggaatacaaaaaagaaagcaaagagaaaaattagattaaatataaaaatactattttattcttatatacaaattctcacatgtgaatattaaatagttgtagatccaatttgcaagacataatgggttgcataattagctcggaatacaatacattacaagttttagtgtgcatataatgactatagcagcacaaataatagattatagaggcaatgggacatacataaatattatcgggattattgtaaataagaagattctgctgacttcgttttttcgctatttaatcactggtttggatattttttttttccttattatttcatgtcaaccaaaaaatcttatcttttaactttcactctatttctattcacttctcagttttgtactcatttcactcttaacaaaacgagtgttagttagcaaccgtgatttttgccttcatagatttctgtcttttggttatactaaggagaaatatgaataataaaataaaataatgtaaaaaagaaaaacaaaacattaaaatgccactctagttcaacgagaggagaattgaaactgccacgtgtaagtttttgcactttatttaaattggaaatttattttcagtatttgaatgcgtctttggtatcggttctaggaagtttacattgatttgatttcggcaactagatagcaaaccttggtacgagataagtttgtggaaaccaatttcactttctcctcacgtttttcctgaaagataatgaacaccgcatcagatctaaaacctatttaatttattgtggaatcttggtaattccaaatgttgccctaaatgaacctatatccatgactgaccttgcatacactttaattagggatgctacgtacccttttttaaggtggtccatctataaaagtctagactccatagcaaggtatctagctaaagttttattgattaattaaacccaccaacctatctatctgtaatatattttatatgtttttttaataagattttattttgttagttacatagatcatggggtttggataatgtaatgaaatgaacgaaaaggttctcaccaaactgatattagtatatatgtaaccactgctaattttttattaactaatccactaacttacacgtaactacgaacattatcgttgataattaagtatgctaatggtttactaaattgaaatcgggatcaactaactacaattaggtttactatagtttgcgttggatgttgatgcctagaataccaacacacgtgttgacaaacagaaagaaagtgaaaaacacacgacttggaattatgcttaatttcaagacgtgtaatcggtgtaattgagagatgggttcctttgaaaattgatttttgtgtttatttgatcgtggaagtttggtaaagtttcgaagtgggttttgcaaagttgggatgcttgtcttcgtagctaaaattcagtaatgcgtgtagtgcgtgaaatactttcggtgggtttgcatatcatctttatataaattggaaatcttgcacagtccacacttcatttgtagagaagaatatcaaaagacacacttaataaaatgttttttttttaatataagcactcaaataatcaactaaagaaccacaataatgtaatttatttaattttcaaacaattgtttttctttccaaattaagcttgtttttaaatagttttttttataaaaaaaaaagcaaatatatattaatagaagcaccagagatgccaaaatcctgagtacaatgtgctcgcatgctaacaagaaataataaaagaaataataagtattggttgtttctacatttattttattttttaataaaatacagtaggctaaagaccagcatgtgcatgtcaagactttatttcttatacaatctcctgaaaggatatctcctctacttattcaatataatttattatatcttgtaatagacatgtttcacaattatcatggaagaaaagaaaaactcaactttcttttaatgacaaataaactcgattgagtgtcaatatctgaaaaactatcgtccccaaagggatttttgtgcttgaaagtttaaaagagactttttcttccattagtagtccacaatatgttttgagaaaaaatcttaataagtaggtttttatctaatttggtaactagttatgtttaacaaaaatagttgataaattaattgaaagttataaaatatatgcttttaggttgaatttaatttgatctcttattattttctatttacagatcaaatattttattaaaaactaaaaataaattgaattaatagtatagaaaataaaataagtaatatagcatcaaaggaggctatatatgataatttttttattaaaatattaatgataaaaatgaaagaatttttttaaattatatttttttttgtggaataaaggggctaaaactccatgttaaattatatgctacaagttacgctattttaagtagaaaacgaaaaataaaacgttagaagtaaatgagattaatttatttatcaaacaattactttagccaaataaattcataaagtaattaaataagttactagataactaaaatagtttaccaaactcactgagtgatatttggtagttaatgaaagcttaaataagattaatgtggaaagggaataatatactttatcgaattcatgcatgagagtaactttatggagaatagaacctaagaacaaaactttagggaaaacggaataaagcaaaacctcattatttatttatttaatttaaaggttgtctataacctaattaaaatgacaaaatcttaccaatttttcccagaacttttcaattcattcacatgttttctctaaatttggcgttagccattaattctcccactagtttttggctttggtctcgtcaccaccaataaataaaaacggtttgagattcctgcctattatttcaatataaacccaaaatgaacaacgcaattaggaattgaaaaaaaaaaaaacacttctcttagatagaattcaatcactaatcctaatatcatgtacaagcctggcgtacatacaaacatgagcaaacacatgacacaaataaacctacgtttttattattgttaatttgttatgaatcaagaaaaatcttaaacaaaattgttctcatattttaactagctgagaaaatgctttctgacttcttttctaatttaaataaataaaaagatgttagttgttcatcactccttacacacatttactaatgtgtaaatattaaggttttatttggataaacttatttataagtacttataagaagaaaaagataaagtaaatttttgcacttaatttatagaagttttttttttcatttaatttctataaaagttatggtgcataagttgatcttagattatagagaaattgaatgtattttacctttttattacactctttctaacagaattttttattattagttgaaattggtaggaatcacaaaattgcttcggtttcactttatttaaagaaattttttaattaatcaataaaaatatgtatgagaaaaagtgtgttagataatatggtttcatgtttattattatttgatggtcagaagaaaggtgttaggatcaattgatagttcatcaactgttagttagctttaagccttcaactgaataatatagttagttaaagtggttgtacagatagctcacaaattgggccttgaacataaaatccaaaaatgtgatccgtgagacaggcc

SEQ ID NO: 259 - DNA, 9530 bp, Glycine max
  source 1..9530: mol_type = unassigned DNA
cttggccgtagttgaaggactcacaaatgggaataatgaagattgtgatgagagagagtaaagcagtgcatagtgtcaaacaccctatgttcttttgaacgttgcctttcttcatttccctctctctccctatgctatgtctttgtttctctttatatatgctgtgtgttgtgggggctatgatttacggggtcgttttcgtagggtcttggttagtaataggattattggctagtgcattttgtcttgactacttattttaaatatttcattaacttttttttcactatcacatcataatcataatgagggtttaggataaattttttcattttgtttgtaaacaaattcaaacggctgaatagaatgtaaggaaaatttattttataatcaaggcgcgtgcgaaatatgctaggggtgaattttctgtgtaattgaacggctttatacatttcaatttggaacgataaggaaactaattcgctaatgtatagaatggaacctgagatgtttgaaaatgtatttttcaggaattcaatcaattcacacttgtggatgctagctagcataacggtatgtgccatgtgtattctcttttaatgtctttgtgcatgtaaatttcacacttggatgctagtataacggtatgtgccacgtgtcttgttttttttagtgtctttgtgtatgtaagcaaatatatggttggtaactttattcatgtaaattcctcacagttcaaaaacgaaagaactgaactacctgtgtatgcatgtaagcaaatatatggtaggtaactttgttcatgtgaatcctcagtacaaaaacgaaagaactgaactaccaaattcagttttccaaaccttcagtccggttgattaattcttttccctttggtcaaactttctattttatgtttggcttaattagacttttcctatcttagtattataaattttcttatttctttaaaatttcattttgaatcataaatatttacattcttacctagtcatttaaaaaaataggattttttttcacagtatttaatcctttttagtatacatgatattgtgctaatgcctaatgcctattttatatataatgaattgtatttattttttggttatgtttttttaaaagcaaaacgtgaatattaatattttactaaattaatatggttagtatgtgagatggagtcatcaaatattagtttttaattatatggaaaataatagttttgggtaaacttgctaaatgcaggctataattatactcaacttgatcgaatggtacgtgatagtatgataacttcagaacagggacagattcaatttaggcccaactgcggaagtgcccccaccaaaattataatttttgtaaatgtaacatgtatgtatagttataaaatactttcataatttgaaatgtaattaaaaaaaatctaaaatatgaatattgttcccactgagttatatatgtggatattattcctacaattgattttttttggatccgtgctgcttcaaaagctattcaaccatttaatgtctttatgaaataaaaatacagataatacataagaactttaatccttcaattgtgaatagtacaaattatttggataaaatgtatttgttggcctgctacattatatacgttaggatgccaagcccaacttacattaataattgtgttattggaacatctctttcttgcaactccatattttgcttcatgcactcccaagaaccagcaagtttattgctctttattatgtttgaaattgccctacgttgtagagtgttttttatgttgtgaaactgaaattgtttaatttgaacgcttttgcttatgattttttaaatcatctgcataagaatcttatgaatgtacactaataagtgcaaatgggtaagtgaaacaagattggcaaacctgagatcaacgcttttgcttatgattttttaaatcatctgcataagaatcttatgaatgtacactaataagtgcaaatgggtaagtgaaacaagattggcaaacctgagatcacagagcaatattaaaagaattgaacagtactttttttttaaaaaaaaggcttggacagcaatggagtgtatctagtgttttcaattttggcaatagtacaatatctataaactcatttaaactaaatttaactactccgtatttgaagaagctaaataggataggactcgtgagtcgtggataaaaagatgagatgttgaaagaaagaataaaatctcatactctctacaacattccaagcattttatgaacctaacaagacttttgtgtgagtacaccaattatcataataatcattggtaagaaaagggaattaatcaagttcaagtcatttttttcacctcttaactcactaaatgtttctctcaatttttagaacccaaactctgatacaattttgttagaaacaataaaattatagaaaaatagaagaaattttgtattctttgtcttctatttattgtagagtaacctctaatcattacaatcaacctaatgttaatgttaaataattttttattacataataaacaataataccttttaaacaataatagtattcctttatataataattaaaatacaaaaaataagttggtgcgaaaaatagaaaaggggtatgaatatcaactccctatcttaattctagaagcctacccaaataattgttttgtctattgggcctgataaccactaacgaaatcgtcttcataaatgaattaaaagagatgctgataatgaccaaaaaaaagcatctgtggaccaaaataaaaatgaaaagcgtaggaccagaaagatacagatttctaagtttccatcagtgacctaaaataataagatagaggtatttgttgttgttaactgtttaaaatttaggataaactatctttttagtctttaaatttttagatttttttatttttagtctctaaactttttatttttattttgtcttaatttttttatctttacttttagttttttaaccttttttcagtctttacctttaaaaacagattaaaaaaatttcaaggacttaaaaataaaaatttaaaaatttaagactaaaaaaatatttaaattaaattgatttcatccacttggttctaatagttgaggaacgtattattggttctctcccttaaaacacacgttaagttttttctactcagcagtcgcgctcctagaaatcttccattattatgtgtgtgaaagagagtgagaaggaagaaagtgaaaaaccaattaatcaattctactcaaacaagttcttgacgcttatggatttatttaatcaggatatggacaatcatgactttcacgattctctgttttacggcttccacattatgatttacataattacatgattatggcttcttggtctaattcgggtatagaaaatcataatttacaaaatccaatcctaatatattgataagtctatgtttacacgtctagttcaatatattaccataatttgttcctgaagttaattctttctaaagcaacttttggttttagtttgaaaataatagtatagataagggtgtgtttggtttacattatattatatttttatttcctgtgtctccattttttgaaaactgtttttattttcaaaatattaaaattctgaaaataattttttattttttatttttaaaaaatataaacactgaaaatgcgtttttaacaagaaatatatttctagatttacattttacttaaaataatatttttggtttcaactgaaaacattgaaaataaaattttattattttcaatttttgattcgtttgggaaaatatttttacgaaaaaaagagaaatccaaccaaacaaatttttattatcattttctattttctaatgaaaatagaaaacaaccaaaccaaaccctcccatatacttatgttttctaagttctaactatgtatttcacaactaaacatgagttgtgtcgtttatgttcgagatgaacgagttactcctatttaggttgtaggcttgatgccatggaaaaaggaaatctattaataacctctttttttttgttaggatagggggtggctagaaacaaggataaatgtgaaacataacgtctacacattatgatataaataatatgtcccacttccacccaatccatcaattgggacctccttgtccttatctgtacaataaaatgcgccctcctcaaatggttggacagaagcctctctccctaaaatatatatatatataacactgccccaatcaaaacctagcaagctaaaattggtgaccaggtgaaccaaccagaaaaacgtagagtgaacttccatcataaataccgtcaaattcctaatggggaaagtaaggtaaagacattaaaaattgcccacataagcttatgtatagttttagggatgaattcacctaaaatcttaagttttaaaggaatactttacatattgtctaagcttaacgcatgaatgatgtattaacttgttctttatctgtacttttgctgaaaatgaattttagaaagaaaaaaaaataatatgaaaaaataaactactaattatttaactgtaaaaattttaatattatccggaactaactccttttcagaaaaaaataaatgaatttgtgaaaaagtttatgaatgattttatttctattatctttgttttattcccctttacaaatcgtgttagactggtaggttggataaccaagtgtaccagatgcaattatatcaaatgtacactttgtttttaagaaattgaacactatgaagtatgaatgaatcttaccgacctaaagagggtagcaatccaaatcgcctgccattttttagtacacctgagagtttaagtgtagaaacgtcttagctccctattgattatatattaagatttttaaagtaaacgatacctgtgtgaaactggcaagaggcaaattggcaaacagttttgacttgatgaaaacaaaaggttcatttagtgtgcaaaatatacagctaaggatttgttgataactaactaccattcgataatatgtctttttgaaatttatatggattaattataagtagatcattagttgaactagatatgaataaaaaaaaaacaatcattaattaaattaatgcaataatgcaccaaataaaaaaatatctttcatctaacaaaaattttcagtaacaagttccttttacttaatttggataacagtacatgactgtgccgacctgaaatgggaccttcaattcttcatttttgtggcgttgagagttgaaccgaaagaaagaagaaaatggcctccaactccaaccacttcctttggttgattcaaagataaactcaatggctgcccttattgttaattttcttttcggttaatattaaattgaaggaaagaatggctgcagaaaacaagtaaaattaatgttttattaattggcaccaatgtattgattactaccttcgtccgcaagtatttttaattagcaaaaggcccagcaatacatttacttatttgattgcattgataatggcaaaactagttggctgtttgtgtaagtatagaagaatggggcatttcaccgactaatatacggcccaataaatttttctgtatcaaaagtattaatcccacgtcattcttcttctgttttttttttctttcttgctaatgacgcgtcatttttccttttgtcatttgtgtttttcaaacgttgtccatgcggtgataacaaatgaaataaatttaattataactaacatgttacaaaaaaatagacaaatataaaaaaatgtctataattatttcctagtgttgttctttttgcttacagagatataggatgtaacaaccatgttgacagttttgattatgtaaactaaaataatgtttaatgaaaaccctttgaaaatatgacatttaggacaaaccaatgatcaattaaatataaataaaggagtaacttgagtttttggttataagtttaattatgtatttaattcatatagtttttaaatttatatgtgaattttttttcctgaagtttaataagttaaattttttagtttttaaagtttatattttaatttttaagaggtttttgttgttaaaattttttaactctgttaattaaaaaattttaacagcaaaattctgttgagaattaaaatataaactttagaaattaaaatattcacttattaactctaaaaactaaaagaaataaatttaaaaattataagaattaaattgataattaaatatatgttactatgttaggatatgtatggatgaggatttgatcaaaaacgatagcatcaatctctgtttagttttttaaagatttttattttaaaaataattaaatgatcagtacaataatttaatcatcaaatgatattattttaatactatgatatgtaaatttatttattggggccaaattaagctgataccaattacaccctaccccaaagtcattattttaggctgcgcaaaaaaagtcgtattttagagttaatttaccggtcactggctattttaaaggtgcattcacttgaaattttactaattttatttttcatatggttcctaaattaaatgtcattaatcctgaaatacatatcatataatcaaaggacaaaaaaataattttggcatgtcatttgtttaaaaaaacactttatcctatcatttaatacattttattatacaatttaattaatttggcagcagacgaaataaaataaattaatggtatataatttttttacactgataatgtattaaaaaaaaatcttactctagatctaatatgtctgtattggttatatatgtatacatagattaacaagtcaaaaaataaaaataaaaaatggaataatttttgctgttgttgacattttgattttttttctttactttaaattctttagctatcaaccaaatctatgagatagaaatgagattaataataagtgagcatgatatatgtgaaaaataagaaaatgtatagaaatcctttttattgctactttctataaaactggtgggaaaaaagatggaatttccacacgatggtgtgtgtattagtgtccttcgctgctttttgagaatttgactgagataaaatcattatcatttatgggagtaatggttataatatgtgtttggatccaagtcataatctctttttttagattttctctccttgaaatatagtgtgatcgataatagcatttcatggtgtgatcggggcaccgtacaattctgtcaaatttctcctttctcaagtcttcatcgctacgtgcccccttcaaatgtttgtacaagtcttgtagctttccttggtttcacatttcatctgcaccatttgattaaataaggatatgtgcgcctgtttggatattcgctgataaattataattgattttgattaaaatattttttgaattggtgtgatttaaatttgagtgtctctgttataaaattaagttaagaataaaatttaatataaattttgtatgaaacataaaaattatacaaagttatttcaacttaattagtttgggactcaaaattaattttgatttcttttctaaaataaaattaaacatctaaaaatttatctaaaatcaataaaactaaacagcgtgtactatccttgagtttttttttccgtgattataaatgaatattattttaatttaatttgaatgcattcacggtgtgattttatccttcatccaatcaagtatagacgtatagtaatatatcgtaagttttttttttttttaacttttataatgactacttaaactcattattttggaataatgtccgttagacatggaaaaccaatatgattgaattggcctttctttagaattgcggatagacgttagttaacaaaacaagacaagatgccatagcggcgtatatatcaaggtgctacactttttcttctttatttgcaataggaaattggaaataatctgaatattgcattcctcaagtttatgtaatggataccttataatacttcttttctataaaaaaattcactatataagttctaaataactaggcatatcgtaggatcgaaaaaaaaaacagtgatttttggtaaaggagaagagaagcttgattaaatacggaacttggaatttgtccactctaattatgctattacctttgttttaatatcttaaaacatttggatatatatgcatggttctgtacattatatatttcggtatagttgtgaacacagacatgatatttgaaaagaaaacctagattaagtaatcgtagtttggctacctaattgctgttagattttataatttaagcataaattaaataaatggccatcaagcttaagattttttttcctgagggaaactttcctttttaagcaaaagcacacatgtttcctgataaacgtgggatttgggtgcaacacgagagaaacttctaatgctctgtctaagaattttacattcctagtcaaggagaagaagaaaaataagaattacaaattttccattttttttgcgaaaaaattctattatataatggagtgcgtttgcgagaaattgaagaagaatgaagggaaaggatcacagaaacaacatttttggaagagagctgacggacatatatgaccttaaaattctttatatcattaatttactgtactttcattggtatgaactttgaacaaacagttgatcgagccaataatgcaatactcccatagcaaatgatagatagaaaactgattctggcatgataaaatcataaaataatagtacgactctgtcatgatgatgatgcctactattcatttggcaagagaattgatgaattattatatatacagtcctgaattaattgattcccaccaatttatttctttttacccagaagaaacaaaaacaaaggcaagcaagcacatgtaatcaaattcaaatcaaagcagggctggatggcaaagtccaacgttcaaatttgagcaaaattattgaaaaataggccgtaaattcatcattgtttcaaaatgaagccaataataatattagacattgtcgggtatagaaccaaacatgtacctccagtcccccttgacattcgcgacaacatagcccactacaggatccaacggacagttcagctaacattttctttctgttgtcttccgcaagtagtaatagtaacattttctaacctaacattagcggttctgagagtagtgcattggtgggtgggtctccaacatgggtcaagggtcccacacggtgtaaagtgaaagctcttttccttcaaccacgttggctcaccaccaccaagtccatgtccccactcccctctataaaattccacaccctctcctcacatactaattaactgcaactttcttttcttaatttctctctattagtctgcatgctctgcaaactgagcatggct

SEQ ID NO: 260 - DNA, 3000 bp, Glycine max
  source 1..3000: mol_type = unassigned DNA
gttgagggggttacgcaatgttcggagccacgttggtaaactgctcctctatgcatcatggccgagttcatgggtggcagtcggggatctccatgagccgagcaagtggagccctacgagccgagcaagcaaggccccacgagccgagcaagtgccgagtttcgtgagccgtacggtccagttttttcaatttttatattagttatcagactaaatatattttttgtttctataagttagcgttttttatatttggtctctataagttcatttttctaattttagttcccgtaagtttatactttttcaattttggttcttataagtttttttatttatttttaatctttataaatttgtgttttttcaattttaatccctttaaaattttaatttttatttataatccttataagttcatgtttataaggatcaaaattaaaaaataaatatttatagggactaaaaataaacaaaatatcttatacagaccaaatttataaaagcattaacttacaaagactaaaattaaaaaataaacttacaagaaaaaaatactaatttattagaacaaaaatatatttaacccgcgttattattactatttatatgtttttgaatcctggctcctgattgatctaactagaggctcatatctgactgttttcttttttttgaaacactatactgtttgtttggagaactttgcaaataaattggagggttacaccacttggatcgaaaggatttattattattattattattattaatactattattattattttgtttgttgacacttttttctctttctatgtccttgtttcttttctttttcggcttgcattacgctaagttcaatacaaaagatgcatatgaaaataaaaagcaaactggacaattcgagcaagaaacaacaaatacaaacaaacatatataaaatacaataaagaaaaacaacaaataaaaaattggtcagttagcctagccgggttcggcaatgattgttcctcgataacttgcaagatatctttgatcaaaaagtcaaatcaatgaaccaagtctattttctaggctataagtacagagcagaagaaagttcaaaaggaaattttatgggagagcataggatagaaatcaccaaaatttttaaagtaaattcaacgctgcacctgattgacaagtttggtgaattttatattattatataaaattaaatatctcttaaaaaaatcattttttaattatagatttcattttataatttagataatttttaataaattttacatcaatctcacttttaaatattttatttattttctctctcacgtcacttgtcaaccttctcttttttttatttttttcttttctcatttccctatcacatgttgtcttctttcttcttctttttttcttcttcttcctacgccattgctcatcccctttcccgtcgcccttctcctttgctgctattctcccttttcccttttcctccgccacaaccccctttcccctattggacctccgctgcaaccccttatgccataatgtctattttttatttttttttttctgtctgttttactttcttcttcttcatctcttttttatctacgggatcttcccgcattttgctgttaagaaaaaaaagtaaaaaaaaaaattgatcaatttacagatcttcaaaaatcttgtaaaaaagatcccattcttcatacgggagattttgcttcatcctttaataaaaaaatttgataaaaatcatatttttttattaagtatcatgttatacattcttaacaatacattcttgagataattcttctaacaatattttatcattagttaaaacttattaaaaatttacaaaattaaaaaagagatagtttatgacttcttaacaaattttagcccacaacagaacgtattttagaaaatgtgttgatggcatgctgattgatcaatgtatgcatattgattcacacaagcaaatgagcatgtataagaccgaacccataagcacaaagcacacgagcaatagagcaaacatcaaaatatctaacaaaagcacacgaccacatgaatttcagacacataataacggttttgaacaaaaaaataatggtctcaaaattagggatcccgtactatctgacagaaagaaggaaagcaaatgaaaattaaaaaaataaaaataataataataaaatgagatcagtcaatttttttctttttttatcaacaaatattaattattaacttattagatttttttgtcagaatatatttgaattcaagacctcttttgaacctaacatctctctttttcttttattttttcttcgaccactaaattaatctcataattttatcatatttttttctttctccgtcgagctatgtatttgttcaaatcaatcactgttatttgattttgtttgacttttatattattttgtatattgttcatcaattttggaagctcgatgattgtgacgcggtgttgtttgtgtttgtcatggttgggaattgatattggccctccaatattgctttgagcccctaaaattaatgcacagatactaaagtattttttatctcctttcctcttatactcactcttttccatttatggtgtttatagcacaagggaattgtcgaatcacaattttattattttataatttgtataacaaaacgaaatcaatttgattgtatcaaaaaaattataacataataaaatcatgattttattttaatatttgagttatttgtatctattaaataatgaaaaaaagaaatataacagaagtataataatttcattacacattatatactgaaatcatatttttattatacattctttgttaacctccacttgcataacaatattaatatttcgttggacattttttcaaacttagatatacaatggaaatatacttccgttgcactaatggggtgtaaaaaaatacacaaatatacaacgga

SEQ ID NO: 261 - DNA, 2629 bp, Glycine max
  source 1..2629: mol_type = unassigned DNA
caagtgaagtcaagtcaaccatgtattggtcttctatgctctcctaacctaaaaagaggttggcttttgctagccgatttagtttattttccgagtactttttgtttaatataatttttttgcaaacaattttattagttctctcctggaaaggaaaatttgaccaacatattttcgtatagaaattatgatcaaatataaattattctttttaatttatttcttttctatatcaatttgtattatgcatactttaaattttataacaataataacattatggaacaatataacatatggattacacaaagaaaggaccacaaatgtttgcaacaagcttttcccaaatccccaccaaaaaccccaaatatgtcgttttctatgcacatacacacgtatagttttgcattttaattgaatcttacaatatgtgttacaatcctacaacccccctcccctgcgggattcagttacaatgctgaaaattcaatcttgacaaccttgctctgttgcacatataatataagcatagtcactagcagagacaagacatattttatcttgtggtataaatgtaagtgtttttaaggaaattaaagcattgaaatataactaatatcaaataaagcataatcatcccaatcctatataggaatagggaaagaaccaaaatgttaagagcccatttgattattctttttaaaaaaattctagttttttaaattaaaaattaaaaatcttgtttgagtgatgagttttataaaactgttttttaaaactacctcctattttagtttttaaagtaaaaaaaacaaaaacagctttaagatgttttgcttttcagttttcattttttgcattaaaatctacaaaacacacggataagcagagaatttacagttttcgttaatggcatttatttaaatatcttctctttatcatttctgaaacttttgttgtcttgcaagcatgtaagcgtttttcgggatatgattatcacaattgcccacaatgttatgttggtgccctgctaattatgttaatgggtggcttaattgcctattaatatgacaaatattgcttgagtgagtgaccctcactcagctgaagcttcttatattatcatacaaaagccaaacagtatataggtatatagagaggtgcagactaagcatcttatcaaatggctacagcagagaaaaagatacaaaaaggactgactattacaagacgtatactaatacataatacatatactaatttaacagtttgtttacactttaattattaacaaaatcttattattgtttggagtaaaacttattccaatattttgtgattaaattaaaaaataatttgtcgacatcacccctcaagcagattttcctagggaaccctttttatttaatcaaaattgaaattaaactaacatattaatttgtataagttcagaatgcaagcctttttgaaaagaatgcttgagtgagtaactttcacccagcagattacaacctttgttactttatataagaaagaaatggtggtattttttagtccttgcatttagtaaaagacaatgctactttaatctttaaaaatgtgtgattttaatccttgatggggactaaaacatatttaaatatatatctaagtttttcaataaatttaaaaatcataaaacaataatactatcaaatgagttttctgttttctatttttttagttatcaaaacatgttttcaaaacaattttaacaagtttttttatttactatttctaaaacagatttcaattcaaaattaccaaaacagatttcgttttaagtctcttctcataaataatttcttaaatttgttttacaaaacagattttgaagtcataaactgagaagaggggaaagagaaaaccctaaacagctaatttaatagaatgactttgatcttgatagccaaggcaaaacagccataagatttcgtatactgttagatacaaaattttatcattttctcatcagaaataaattacatattaccataaaattgacaactggtaatcagaaaaataaacagaataaagttggcagtatgtaggaaaataatttgtcgacatcacccctcaagcagattttcctagggaaccctttttatttaatcaaaattgaaattaaactaacatattaatttgtataagttcagaatgcaagcctttttgaaaagaatgcttgagtgagtaactttcacccagcagattacaacgtttgttactttatataagaaagaaatggtggtattttttagtccttgcatttagtaaaagacaatgctactttaatctttaaaaacgtgtgattttaatccttgatggggactaaaacatatttaaatatatatctaagtttttcaataaatttaaaaatcataaaacaataatactatctaatgagttttctgttttctatttttttagttatcaaaacatgttttcaaaacaattttaacaagtttttttatttactatttctaaaacagatttcaattcaaaattaccaaaacagatttcgttttaatccaatgaagttggtctcaatccttgatggtttaggacctgatgatgacagaagcgatgtagg

SEQ ID NO: 262 - DNA, 4097 bp, Glycine max
  source 1..4097: mol_type = unassigned DNA
agctactagaagaaagaataagaaaattgaacataatggaaatagtttaatgaaggatcgtgtatgtacgttagtttaatattttgtatattggttaaacattatatttttaggagtttatttgctggaaatagttaatgtttgatttactgtttaaatgtttttttttttttgctatgaggaacacatagcatctgcaagttggacaaagaaagacaacttcgatatggattctttggtattctcaatatataggaaatgtttttaagtttatttttgaaaaagttatataatttattttttctgatattaattatgaatcccccacatactactcctgctaccacaacaaatccaagtgttgtccaaggtgcggatgttgttccccattgcaagacttgtcattacactatacaaaacatagtcaacgagcttctattttccttggctatggtcctcgtcctatttacaatcaatttcttcataatctatttatgcctcaacctaatcaggtgtgtattgaaatttttattagttatgaattgatgtcattgaagtcattatgtggttagtggcatgcacattgatatctaatttttttgttccatcagttttatactcttcttcagaatttcaatcacggattaaattgaaatggttctcctcacgtgcaattaacaatgaaagtcaaattggtaagacatgatttatttgttggaatttgattggtcttaaccattaatgcctttcataatctcattagtttgttatattgttttgttgtagatggtaatgaaggaaatccttaatactagtgcatgacaatcaacaacaccaacataaactaaattggtgaattgttttttggcaaagttgtgttattttttatttatttcaaaactcaacttaatggttcttcttgttttaaggtatttttggttaattacaaggatacaaaattatagaatcattctaacatcatatttatatttaacatgctttaaattttcatcttaaattatggtagtcaaatcttgttacatgatcaatattatttttcttaaggaaattactagtgtacatatgggttagtatccttagtgaatagagatataagtataatttgagttattattcgtaactagattttgacccgtgcactgcatagggtaaacaatatatttaagatttttttttaaattctatacaatatatagtttgttaaattttatctttataaatgaatcaaataatgtgtgcctgttaaatcttccaaattgaattaaataattctaggctaaacactcctaaaaatttcaagtttttgccacttccttgtaattttttatgagattagaggaaaagatgaaacaatagtgacttttggtgttttgagtatgcttgagaagataaaggaagaaagcaattaagtttattagtcacctcaaagaatcatctaacaaaattaccactaaaaactaataaaaatatgttttatttttacaaggaccaaattaatatgaaaaattgttaagaaaaaattaatacttttcaaattttactgggaccacaaacatattttaccctaaacaaaatatgtataatgatttttgtaaaaattgatttgtataaagaaattaatttaacccttaatgggattttaactaaattgttcattcttgtgacttatgtctatttctctatttatttcatacaaaacttggcatgaattttatagaaataattagtaacataaaaaagtagatattaattttattcataacttttgtgttagataaaataaaggataaaacatcatttgtgtctctaaaaatagtatcactttagttctaaaagatgtttttttaattaaaaaacctaaaattgctatatgtgttaatcattttagttcaaaaagcaaaatgttgtgtaacttaagtatttacttgtatttaaaaactaaagtgatacaaagtatcttatttcacattctaaagacttattttgatttttttttcgtttcaagatctaatgtgacaacattttacaattttagggacacaaatggtgtttcagtcataaaataatgtttatattttatatataattttttattttaatcgatttataataaaatttccggacaaaaggaaatttgaaataatctatcaaaggaaaaagataataaataattaacctaaaaaacattaattttgcatggaagaaattgtaatgagtacgtatttaattttatttttgttatgtaatgaaatatataaggttcctatggtagagttgcttacattggcatatctataaggttcctacttccatcccttcttccttactcttttgtgaagatgaatcatgtctaacatgctcatcactattttcatatttcaacttgatgtattcactgaagaagattttctctccatctaaatctacaaaaaatccaataaaaaagacaaaagacgtgacttaaatttgtatttcatgattttgaccttttaaactcaacttataattaaataaaataactcataagatatgaaacaatcaagaattaatcccatctatggtagaatgagctttaattatgtttgcatatgagattagaccttactacaataaaatcaaggatataaaaaaaagggaattaaattataacaccaagggttaattgcatgatttgcatcacaaaatccaagaaacactccactacttcggcaccaacatgctacgctccattccatatgcctctagcttcatcctctacgttgaaataataagaaagtattaaaaaaatcattaaatattttaaactctttttttgtgattttcatattgtatctagtgcatgcccatccaatgccattcaagtaattacaaagaaacataccgcaaacaaccaaatcaagttgacagttacaattaaagaacatagatgagagcttcaaaacagagctattacatggagtactttttgaaatttaggaaacaaacacacataaatgggagcttacactgagaaattccgatccaatcgaagctctgaaatatagaaagaaaatcagaatgagtggccatgtacattatgaatatcgatttcaaatttaggattgaaagtcaaaaaacaaatggttagagaaaagataaaggataactaaattctaaattaacgatgaacaaaattttcaccggaaagatcatgcttacctaatatgatcacaacagtgtagatcataatgcttcaaattaaaactgtaaactaggtacccacaatttatataattaaacagttttttaggaaataatagttaaacaacctttaaatgatacattcatatataatataggaccatttaatgaattttcctaataagaaatcaaacagtttgtaattttatttgtgcaaagcgtaaatcaaatgggtacaaaattgttttatgcaattctatagaataatatgattgaaaccaaaaaaacataaaacataaaacataattttatggtcttgtttatttctctcaaattctactcatagcaaagttcaattttgaatattaatataaaaccaaaaaagtaaagttttgattactaatgtaagaaagcataattattataatattgttctgacggggataaaatataatgaccttaggtgagaatacaaccttaacaccaacttcctatatcactttaaattagcttgattgtaagccaaataacatacaaaaataaaaagaaaaacatgagaaatcaaagaaacgatttgaacatataaattgtaacgttgtgttttcgtaattatttgttcaagtgatttaattaaattataagagaaattaaatttaagttaagtacttgaattaattaattaattaattgatgagttagtgatggtgagcatgtgttcaatgggtatcactgagttttggtgtgtttggacctagatgaatgagcttttgatttatgagagagataggtgtccttaatagaagccaaggtgaagatagagagaagtggaagggttaaaaatccctcataaaccctcgcattcaaaaatttctcacaaaagaaaacttcttatttca

SEQ ID NO: 263 - DNA, 6100 bp, Glycine max
  source 1..6100: mol_type = unassigned DNA
gacaaaagaaatcattgtagactagtgtgttaataaggtaaacccactgacatcaagtcttcccagttatcatcactaacttatggtaacgtttttgtgtgtacctagttcaaatcctgaccacctacatcttagaaacttatagagtaatatatactttttttatggaatacttttaataaaagataacatagggaatcattatttttatgaaggaatatcatttaatcactctttggtgcggttaggggccagcctgaaacttcttaactttttagtggggtaactaaattggtctattggggaattagaggatagtataaaggtgtaatgtgattgtcctaatggatgatatattttcaaattgaaatgtgaatttttccctgaagctaagtacctctctctaaaatgtttaatttttggaattgaccagtgatggaaacattttgctggtgagtgaaagggaactaacatttcatcattacccatgttgactaagggcttcacaaaaagaaaagaaaaacatttaatttcttgttaatgattaaagtttaaggcaggctgttcatgtcaaagttggtgcagaggtatcatggtttgagtgtttatgcaataacaaaaaatgttaactttaaataaaaagagatagaaataataataatttgtatgtttttattatttagtaaatattaattctatattaaaaattaaaataaattacacttaacacccctcaagtttcattaaatttgcataaacactcacggtctttatctactccaatattaatcctctcgattatttaaaaatatacattgatattcatttatacactatattgatccacttagttatttaaaaatatacactaatatccttttaattgtttaaaaaacatcacatcagacttcagacttccttaaagcgagttcaatgtaaatgttaaaaaagtaaggaaagttcacgcaattttacaaaattgtcgagtttatgtaatttattttaaaaattttaattacactgaagtttatttgcagaatttattatatttttacttattttatgatatacaaatattttttaaatgctaaattaatgaactgaaaatattttaatgagaattttaataaaagaataaaatactatgagctaattaaataagttttaattgctttatttaactaattaattgactcaactgagttcttatttctaaccctttatacccgaatttaaagctatctctgctttaaagcttaaattatctttcttaacagttttggcaaataactaaaaaattatgcaaaaactgaaattgggtaaaagatccctccaggaaacaagcatggactcgggactcgggactcgggactcggtagtgagaagtaacgcctatgttgacccaaccgagtccatataatcttgcaaagtctattactaatattgtggtgggtttgttttatggataaattgttttatctcagaaatattagaggggaggggaaacatttacgccgctttttattaagaagtaatgaaataattaaatttaaatatattttattgttagagtcaataatctcaactttaagatggaggaagtagaaaatatttatttctgactcataaattactcttgatgagtaaaaatacaatagggtctccttattatcccctaccatactaccctcttaatgctcccttcacgtaggtttttcggataaaatataatcatggataaaataattatgacactgtaacaggttatagtgattttctttggcattgttttttggaactttgggttgttacatttgtatatactttggacacatttgtatttttttaaacaaactttaatcatgaggatatttcaataattattatatatatttagaaaaaaagcatgttaaacaaacatatattttaattatttctgaacatataaaaaatattttcaaatatttttaatagttaatcaaactcattttaataatatactcaaaaataatatttccatattttatttttaagattaaaaaatttatccgtcaaacaaacttaaagaaacaccagaaattattttatactagagcaaagattctcttatatgctttatactgtcgttaaaatttttacttaaacctgatttcttttgaaaaaaaaaagtaaaaaactattttctataatttataaaaatttaaaaattaaataaaaattactttttcaagaattaaatgactaattaaaattaaaataaccctatttttgagaaattaaaatcatatttaagtttttttaaaacgtaaaagggatttccaaaagttattttattagtcactgatgagtgatgacagaaaattcgacgttgcttataagtttttcgaaggaacaaaatacatattttataattttttgtgaatatataaatacatatttcatatattacaatgaaccagtattttatgaacattaggagaggacaaatgtaacccttcaaaacttcaggcatcttttattacatctaacatgaacatacaatctttattataatgtataaattaaatcttattaaattctagtcctatcctattcattttttttaacaaaacacagctaaatcttgatattttaaatttcaactttttttaccaatagtttgataaaattatatatcaaactagtgtagtttgaaaattatatttaagaggtaggtgattttgacatctttttaactggggtaaaacattacttatatatatcgattataattacaattaatattaaacatcaaaatcacctatgtaagtaatttttaaactacattaatttggtatataattttacgaaatcatataatttggtaaaaaaaaaaaaaagttctaaatttcaattcatttccggagatttcgcccgattacactagacttttaccatttggccagtttcttccattttaaaaataacattttaaattttttttttatagaatgattctcagtttatcatgtttctcaccgtctgaggtaactttggatttgaataatgaggattgactaaaccaattattgtaaattatttaactttacagtgcactaaaatcaatgtaaatagtttgttaaaataatatagctttcatttaaaagtaataaatctttttttaagaaaaagtaataaatcttttaagagttttaatttatcttaaattatttgttgcttagaaaaatataatatttaattttaaaattttatctttaatattttgtatctctatatactccattgcgtatgaagtgaaataaaaatataaattaagtaaagttgtaattttcttgtttgacccaccctatttgattcaagtaaaataaagcaatactaagagagttcaattgattaaataatgtgttaatatctaatgtgtttctaagttcaattcatacaaataaaaataataaaacaagaaccataaagttaaatagaattattaataaaaaaacacattgggctaaaatttaatatcattaattacgtttaaataatatcttgtcagctaatttaagtctttggtgagtaaaataataatatacttaaatgtaattatgtttgcctaaattaaatatatttaataacttaatatttatacaatatattaaatgaaaatatttgtggaataaatgaaggaataatgatagtggacattaaattacaaattcatgtcccttcataaatgaactactcgctcattcttctctaacaagtaagcgaataaactaatgatacataaaaaggacaaccataatatttcaattgatgaaaattagcttggaatagatgaaaatgaatacatatatgggagttgcaacaatcataaaatgtaagctagttactcacaaaaatatacagatcaaactttgacgcacgaaacttcatcttaattaggggaagtgaattgagaacctgagaacctcaaataatcagatgcgtgtgaaaaataacaaaagaaatatttttctttcatttttcctttcctcagcaaaccacatttgatcaaggacagcccctataaatggtctagcaatgagttcatgggtaaaattagaaagatagctatatgaaattaacaaagcacaagaaccatatacgttgcgaacaatccaacttaaattaacaaagaaggaatggatcctttattcttctttgtgaaccaaccaccaattaacaaggcatcgaatctactagcttttcttttgtttccttttaagagtgtatggatgaaagttcccgatcgagaacgagacatcgtaaatcagggatctatgctcccacacttatgtttattagttgtatgattcaatttatcaattacttacttttaaaagtaaaataatattaacaataaaaaaaaagtgtcttatgctagttgttgaaatcagaaagtagagatcaaagccttcataggccagccaaaacaatttcaaatcaagacagagtctatcaattagaaacaatttttaaaatcaacttgtaaagccttccaaagcctagattcgtagactataataatttcatataattgacaaattttaaagatgaaattatctatttgatttttttatcttttttttcagtttaatcctttatttattaaaaaatttaatttagtcaattattttatattttggtcacttattttgcttgtttagtttaatccttcgattcatttaagactcattaatcatttaagaataaaatttgttatgttaagaatgaagtggaggaaaaggggagaaaacttactaaacaaaaaaatcatttttagataattaatgacgttaattttaaatagattgaataatcaaattgaaaaaaaaaataagataaaagatcaaatagaactaaaaaaataagataaaagactaaataatttttttaaaaatataaaggactaaaaatgaacaaaaaaaataagataaaagaataaattgaacttttaaaataaataaaagttcaaactaaaccaaaaaaataaaataaaggactaaatagttcatttagccaattttaaatagttactttatctggattgaaatataaaaaaataaaaaaaaaacatgtgatggattaaaatataagcaactttaaactaactcttctatatttgatgatatatctctaaaatacccttcatttaattaaagttttattttcaacaactttctccttttttgttctaaagggtattttagaaaatgatttttttattgagattatcaatattaaattatgttaactaattttcttgatgaatgtgattcattatttttgcttattagttcaaaggaagtattttttttcacttcattaactaattagatgatatatgtaaagcttgtaaactatttatcacaaattcaattattttttactaataattcatgattaattaacagtgaggaaaatagtgtattttttattaaggcttgcataatcttttggtgcctataaaatataattttttttatttaagtcttttaaaaacatttgttttgattttagtcattcaaagatttttattttattttaatccttgcggtcaagtaataacatagttgtgaaacccggtatggtcattggctcggtcgaggtagtgggtcagtggtccaacctatgggtcagtaattagtctgatttgatccggtctatattaaaaaatttaaaattatttatgtatatatcatatataagtatataataacattatttgattaagaaaagtccatccataatttcatactccaaaatccaaaataaaaattgaagtattaaatttgataatacaagtgaagtgtattagtaataaagagagtgtaaatagcaactatctaaattaaaacacaagttcagttttcaataaacaaaatgagccagaagcctatttttccaataaacaaaaagtgcagataaactttctacactcattatttttttttaacgtgcacaacccagtctaagtttttaaaaacaaatcgggtcaccgggtttccacaaaactggttgggtttggccgagccatcctggccaccgggtcccggctgaacca

SEQ ID NO: 264 - DNA, 5903 bp, Glycine max
  source 1..5903: mol_type = unassigned DNA
ctactctgacccttatctggcatgtccatccttcttggcgcagcatttaattcgtcgtcagaaatagctgaaggacacctcacttgtttctcttttggacgccactggtcttgtcatcgtcgaaggcgcccttgcacttgccggcagaaccttttccggcgacctctttgccttttcctttggccttgttcgtcatttctacagagaatgcaatgagaccaacgccaattgcatggtcagagttagagaaatggagagaggaagaagtgtgtgactagagtgtgtgtaactgtgaagaacgacgagtccaaaatgaattttactgtaaataatttgaggaaaaaagtgaccaacacatatcatgcggtgcatacaagaatcggccattggtcaacttgtgagaggaaaaaatcatttaactaataccaaataatcttaaaattaacaaaataatttaactaattaactcgtggaagaaccttcttccgttgactctggcggaagaagttcttccgcgtagttccacggaagatggttcttccgcagttcttcttccgttgacactcgcggaacatttcttccacgagtgtcaacggaagaaggttcgcaaaaaggctgaagggcatttttgccattttggaaatttgctgggtgcaccaacaatgctgctgggtgcccctagcaaatccctctctggaattgaaggataaagtcatgaacaacatagccgaagcaagtcgttcgttagagaaccttaataggtttgtcaagtggcttaaagaataaggattgacattttatgcatctgtattatttatgttagctgaaagaaatcagatcaaagttgatgcagtaagcttttcaagcgattaaaatgtctacaaggtgtccaaaaatgaagatatatatggccatgaaactgaaacaaaatttagtaagcttttcaagtgattgaaatgtttacaaggccactttctttgttttagtcgtctggatgctttaagacaaagacagataatgtaatctagtatcctttcttcttttcatttgatatatatagtcttgtatgacattgtattcaagttaagagtatctcttagtactttaattcttaaatatgtttttcttataaaaaaaatcacgaaaaatcattaagatgtaaatacttatttttatatatttaaagaaataccatagtcaatatcaaaactgatgcaaaacagataaaaaacattgctccaaactagtatatcattcttggattccaaggcacatctcaattacacagcctactctgagcattatttcacttttttctgcaattaacctcacagtgactttacaaaatctagttaactaacattagttaatggagtccagtggcatcaattgattcatgtggccaaacctactcaacccagtaagtgggatatagtagcagagatgttcaatttctatctactgaacctactttgcaagtaagtaacagagaggtttcctttctatctctgcctctcacatacctaactaatatatggaatatgttgtatcagttatttctcaaaactttaaataaccagtgtttgaaatgaattaacttaactgtgctgaatatgcagaaataaaacttggggtttgattgtaagacttttttttttgccaagggtactgttgcttacttgagaccatttatgttgttaaatagataacacctctatgcagcagaaaagagtacaacaaagccaatggaagaggtttatattcaggtcaggtgtagcacaggttaaagttcacatacagtttctgatagtacattgggaacgtaccttggatctgtaaaggcagttttaattttagtttgaataagttaattgataagaatatgttattctgccgttagtgaaatagttagtttcagattttattgtttagttaatagaagctcccaaaatcacaaacatgatttctattcagttgtaatttttttatacggctgaaattacaaacactggaaagaagaaaaacaaaacacaagctatctactccttaaaaaataactactccaaagcgcatcagccaaagaaggcttcattaagcctggtgcacagaatgtagttgtctctgctacatcaggcaaagaacatatgaagatggaggtgtaacttcaactagctattttctcattaccctcttacacattagaaatttgtgcatataaatttttgttcaaattaatggtaaattggttactagggtcatgatgacaaaataattgaacatctatagttattataaaatgctaatattgtactgtgacatgcgactcttttacaagggatgctatcagaaacctcaaataaagcatagacatacgactctttttgcatgacttattacttggcattaaccgtttcacactgttttgctcatgctttcaataatgaaactcatgtcattacaaactcacatgttgaattattcattcatatcttataaatctgaatttttctttgtatagttttgaactcagttggacaaagcaaccttgctgggtgacatgattatacatttgaaagagctgaaaacaaatgcagcacaagctagtgaaggcctaatgataccaaagaacaatgataaaataagagtcgaagaaagaggatttctacattcagttctttatctataagagatttcttataagaacttttctttttaaatgtgtaatttaaatctccatatgcatagcatatatctaaatatgatgagggagtgagtgagattagcaaatagcaatttcacttgttagagaagctgtacattctgaaaatcatgtgaatctggttgtacatgtatcagaagcataatagcaactttactcaggttatgcgcacttgctgttgttgagtcattcagcattgctactcaggattactagaattgaaatccaatacaagctcatgtgtactgtgattcaaactcatgtttttttgcaattaaatgtcatgtttctctctatttcttcttttatttttgtgttgtctcccaagttttctttaccttatacaaagagtgaaatcatatcagtgctgcctgaagatcaattaaattaaggagcccgtcagatacataataaattggttttagataggatatgattgaggtagaatgaacaaatatgcatcaagaaaaaaatacgccaccaaatatgcatcaaggctgcactctcctacaccaaacaagtacatatgatatgttaatcccaaaatataagccacaaacacttgccaatatatacaaataaattagctatattctacagcaaaacatgctgtcatgcttccatgtacccttttcaattttgttccgctgcattggaatacttcatttatattgaaacagaataataaagtctgcctccatatttcataaatttattgctaaaagcagaaatgagagcatattcagtatatcaatcctatttgtaagatgcagaattgaacatcaagggatagcctacgaaaatgagttatagatgcttgtacaaggaccctaaaattgatgtttctaaacagataaattctgttacattcaaatatacataaccttggcagagaaaaactaaaaagttaaagattaattcctttgcccacatgtggtgcagaatatgaaatattctgcagacttcctgacagtcagcagttcagaatatgaaacttagaaaaaaatgattattggaaaatgaactaaaaacgaaatctcccactaatagcctatctaaataataaatatcatcctcaattgctccttcatcgccttatctaataacctctagacataattcattctttgttggtccttgaacttccaaagaaacttctgatattcagggtttttagcaaactttaaagccaagtcaatttcttggggcttcactaaatcccagtttttaaaccaattctttaaaatctctttttgaaggatctagctgtgaaagatctggcattttggccaccatttttccaaaattagttatcaccgcatccattttattatcgaaactgtcaataaatctagtagctaatgttggcatgagtcaaggagataatatttaaattttcgttatttttttttcttgtaataaggatccctagaattattctcatgtgcagttactataattactttaattagaactgcatatttatatactttctagtaataagcataatgtacaagaacagaaaacatttttctgtatcttggtatcagaaagaattacggtcaattttttctcctttcctaaaaccctagactcctcaaaaccaaataagctgtaatggcttaagaagcaaagattgtacctgtctcaagttagaatgttagctctgagtcatccaatatcaacatcatacccttaattgaacgacagaaactttaatgtatggtcaaagatgatgaaggttcatgctgcgtgcttgaataaacttggccacttgaatggaaaaaactgtgaaagtcggagaagacgatcctagttattccaaatgggtcatcgaagatgcggttgcacagggatggttgtcgaaaaccatggaacctcatcttattggtatgtttattgagttaccaactgctcgagacatttgggatagtattacgttacccaaatgttctatgacggagaagatgaagcccaacattatgaactgtgttgtaatacaacccagattcaacaaaatggataagcgatgcccaagtagaatggagtgtgtgcagcagatgtaaaaagctgtatggacgatcttaacaaggatcgagtatttaattttctcaacgggcttgaccaacagttcaatccaatttgaaagtgacattctttgaaagaaaccgctcccgagacttgaagaatgctgccatattatcctctgtgaatttcaggggcaagaaactatgcttggaaggaaggattttgtagtagaataatccatgcaatggtttcaaaaactgcctcagggatgcgacctcgttctttgcgagaccttgatgaagccaagaaagacaaaatccgatgcagtcattgcaatgcgactcgacataaaagggaaacttgctttgaacttcacggctatcccgaatggttcttggagaagaggaggcaaatgagagctaaaggcaagcgttcaggaccagcaaaactcattgattatgtagctggaattgctgctgtagcaacaagtcaaggtagttctgtaaattcctccaaagttcaagacaccaatttgttgtttttctcaaccaggttgatgtgactgagccaactcataattcaggtattaaaaatctataataataataataataaataagtacaaataagtttgtgtacttagatgtgttattaaagaaacaaattttttcttttcaatggtgttaaaattctacgtatatccacacatcgagaatcttctttctactttttagtttttaaactagacttgaacttttccaagttgtgttagtatattttgtcttagtggatgtttctatttatgatgttaaaaagagatgaatttgagcattttcattgactagtattttcatggtggtcattagagttcatatgctttagataattgcatcgccgctccacccacgagacacatcgcttgaacccaccaccaggaagactttgatacaagggatccaccgtcgtcatcttactcgttcaagctgatcaccaaattgaagcatcaaccatgataccaattattggggaaaaatacactcatatctttattacttaaaagtcacacaaccaagaacaagaggcaacatcataagcgaaatagaaaaaagatcacaaatttgtttaacgtggtttgggccctcacccttacatccac

SEQ ID NO: 265 - DNA, 3102 bp, Glycine max
  source 1..3102: mol_type = unassigned DNA
cgaagctttgctataaatgatatgaatctactaacggattgtcttaaaaacatgtataagatagaaagatgaacttgatcctaaccccgacctacaagtagaaccaaagttataaaaaaagtgtgatcctaatctcaatctgtcagtagaaccaacactataaacttctttaatccaagaacaaagggaaaactctcgatagaaaaacactccatttgattaatctaaaaattcaaccttggaagcttacaagagactcctatttataggctattccaggcaacccttaaaacaaaagaaataaagtaccactaacaatccccgtaagtattaattgtccactatcatgtacttccaacttaccattacaatggctcattaagttccaccaaccatcataatgacttaggaagttcaaaaacactaaaaattgacctagaaaatatgaaaagacatttgaacttattcccccaaaataaattaccaaaattatattaaaaatagggagaatgaggttgagtaactcttcaacctgaatgctaaggaattcactcaaataaactccagtccacaaatgcaacttgagtcttaagtgttgggctgagtttgctctccaaattattgtcttcaagtttgctgaaataatcttcaaattgtagatatgagacaattcttagattgatctttaatttaactaaaccttctttagcttgtacctccatgattaagctttagaaaatcttttggctttttttagcttctgcgtttgtcaatgagccttccatccattgtaaaggatatttggaccttgacaggttcgtatcaccattacaatccttttacatatatatgaaaaagatattaaaattaaaaaatattataaagaaaaatgtattacaaaaaccgatttttaagttaatatttacttaattttcttttcttataatagtggaacatatagctagttttacgcataaaattaataataatatttttaatttattaaataattatttattagaaattagatatttaaatagttatgtaaaaaaaaattattctcttttgatacacttttagattcgtccttcacagaatagacacctaatcatcactttaaatataatatcgaagcattttttgcataagtaatattgaaatcgaagagttttacttctatatatgtttacatgcaaaaatagtccaatgacagagaagacaaatttcctaaaaactcatgtttcactaaatgagatgacaaaatagtgaatttcaatgacctaaccgtctatgtcaaacttcattttgatatgctacatcattacaagcctttacaaaagaccaggaagggtaaattgggtcggaaacaatttgcccacttcaggccctctcatggtcaccttcccctactattgatcttgcaagacaagcaacttgagaaaaatgcacataacaagtgtgctacaattaattgtccaataaggttaaacattttgcacataacaagtgtgccacaattaattgtccaataaggttaaacatagttgataaaccgttaagtttttttagtatgttaataagagtttaattttttggtccgtgtgtatgaaaaaaaactattagaagaaaaaaaatccattttaataatttttatctgagagttaatctcatgacttttgtttatgaagatattttattttaaaaaaataaataaataattgtctaataaaaattattttagaagcaaagagtaaattgttatctccaacagaaacaattagaagtgtattatctttagcaatttgaatgtgttgtgccctagtaagattgaacattaatttgtaaaaaaaaaaaaacgcagtagtcatatgaaccgaatccctaaaagagcaaatcatggttgagaaatgtaatttggcgttaccctaattaaacttctaaggctgaaagcgttgatattatcatctgcaagtcaaaacaatattgacgactgtggaagatgctgaggagggtactaacccattgctcttgaaggagaaggatgaacatgtggggatgaaaggcctgcacttgtcactattcaggtattgtaggacactctttaatattatgactatgatgcatggtattataaacgttttctcatagtgtgtacactaataattcattttttattaatgaatttattatacggtgggttataattgaataattgaatgattatatcaatgcataatccctcttctcttatataatatacagtgtaaaaacacatctgataatttttttaaactaagttaaaatagaaatccaatcatgattagaataataatcagaacaatgcttttatatttatattgtgagataaacattccaaattaatagatctacacatcaattacgaaaagttctaacacacttttttttttacattaagacttttacaaagtatttcatggaaaagtgatttttcaacgacatgcatgcccactagggtaatgtgttttaattaaaactgtagattgagattacaacctagctagtttagaacgtaattctcaatctcatagtaaccctctcataagccacaaaacatgcacccgattcctatttaactttagtagagaaagaccctacaaagatggttacatctgaatccagcctaatacttccaagttggtctcacttctgacaggtcaaaagaccaaaggaaagggatatggtacgggacacgttgactttgcgcctcagagtcatgtacttgcaagctaattactataaagttctgaatctcatagaaacaaacaccaaattgaagattttgttttgtcccgtagactttctgccactgcccttattatttcccacgaacctgactagtagtagtgatcatggagtgagtgcatggaaatttagataagtcaatctccaacaccaatcataatatagcacatgtgatgaactggtcaacctcatctctataggattggaatatgtaattcagctaatgaatggttaatttccaagagagacttcccttgtccatacgtgaattttgtgtgatagctaatgcaaacattcagttaatttgaacaaagtttg

SEQ ID NO: 266 - DNA, 4000 bp, Glycine max
  source 1..4000: mol_type = unassigned DNA
gctgccaatttagtaaatttagagtgaaaatagaaaataaactcatggacaagaaacagatctttaaaaacaaattactcttttgaaacaattgcttttttaaaaattctattggctaataaaaaaaataaacaattatttcttcaaaataaattgggtcaagcatgtaacaccaataattgtaaaaaacaaagaaaagaaatcataaattagagtttgtttaatctatatcaaatattataactaatgaatgaaaaaaaatacccatagaaacaaattattttttgaaatatttaccatttttcaatttcttattgctaatagaaaaaaataaggtaataattatttcgtcaaaataaattcaaccaagcagatgtaatacgaataaggaacaaagaaaactaccatataaatcagagtttattttatgtatatcaatattaaaactaataaatgaaagcaaacccatataaacaatttttttttgaaatatttaccgtttttgaaattctcttggctaataaaaaaataaggtgacgcttatttcttcaaaataaattgaaacaaacatgtaatacgaataagtataaggaacacagaaatcaaagcttattttatgtatatatcaatattaagactaataaacgaaacaattatgaatgataatatgggctatatagaacctggtaggattgagggaatcgaaattggaaggagacaagggagaaagtcaagtggggtacttgaagacttttgtagaacagaatcatgaaaggggtgtgtaccccacgagtagaccaccagaagaggacgatatggaaaaatgggtacgttattgtttaattgaagggtggtatatagtgatggttttttgtgtgttatgtatatataacaataataacaatagttatgtgtggcagtgtgggggcgctgaggaaggttgggcttgacttgtgggtggtcacagaagaggacagagagagagccaaagggtgattaaatttccacctcacttgtgatgatcaccaccttttattaatgtgtgtcacaggctaccaacgctctcgtggttactttgccgccttggttcatgaggtaacgctgaacaagggtttacacttttttttttatctaaactttaaactttgaactttcaataagggtcacattcaggatctatagtgcagttttctttctgaactttttagttgggaaaaaaaagaaaagaaactcttttttccgagaatttgttggtgcatgactcacatggccacatgaaaattttccccaaaatagacaggcattcatggatttttacgtgagtagtaggtgtttgtaagtttcacagctatatccttaaaatcaccccgcgttagaaaatggacctttcatgcaagtttcaaaactattacgatttcgaaaactcatgaattttgaataattgatctattgaaacaaaggcttagttctttgatctttgaatgaatatttgtacaagtatacctgcgagactagtttctctttttggggtgataactagcgaaacgttaactatcctcataatggcaactttaaaatgcaattacaactatggtcatgatgcttagagttggagtgttgctaggtgcactagttttattatttgtgcactcaatattttttgttaattttaaaattatcctgcatcgaaggtatacgagttcgtggttgatctgtatatttaaattaaacttacggattacatgatccgatccgtataaaatatatgaattatgtgatccatatgacttgtacggatcaacttgagtgaagggcattttcgcccattcacttaaaatgataggtgcaccagcaataatctattcggctttggttcaaggcccgctttgtgatttttagtgtgcagacagaattgtggtaatcatattctttggtaatcaattgaattttatccttcttacttttttatgactgaataattaatagtttattcataatcaagatttttaaatatcatatttaagagacatcaaaagaaaatttatttaatttaccttaaatggtttcaaataaaattttaataataatttcaaatttgataaattagccctttttagtgtatgcaatagtaacaacaataattaatattattattttgtaagttttacatttgcactaacaaaaacaattaaatgttttcaaataattcaatatgttaaaatttgattttgattcattgttgaagtttgaatcataaccattgtgatttttggttcaacaactttgattacataattatgttaacattaacattaatggaaggaaataacatgttatactcttctcttttatgttgatcattgtatctaatttgtcgcttcttttcctaaaaaattatgaataaattttgttgatgagtgaaaatatcatcattaattgactaattgctagtattgtttccttaaataaatctattgaaaattattttattttttataacaattttttatgtaattatatatatatatatatatgtatatatatgatgcccctctaaaaatgatgctctcgacgttcactctcactactgttttgctccacatgggttagggccaaattagcccatagggcccaaaagcatttagggaaagggccaacccatgggctgatcaacttttaaaaattaaaatttagaaaattaagacaattttttcttgtgatatagtacttgttgatgtgccttaaatctaaataatttaatctatattttttaatactttcttgccaaagtcaagttgaaatactctggcggaggccgagttgtagatattgtaagttacatcgagttgaaaatgctttaatcaagataaaattaaagatattctagttgagaccaaaagttgaaaatattctccctagctgaagtcaattgaaagatgctttgattgaggctagtcgaaaaaagtcttggtcaaggtcaattgaaaaatgccttagtcgatatttacttacctgagttcaaccaaaagaaaccttgatcgaggtcagcttaaaaaagcactagccaagtttggctgaattaataggccctagtcgaggttagtcggaatgggaaagaagctcacatttaaaaaccacaatatcctgactacaatttgaaaattacatgtgctagaattatcggaaaaagaattgattaaaaggaacaagaaaaaattgtgtcgtgataatattcactgcactgaaagcaaattctgatggacctctttggtgcaatccaatacctagtttgctccccaaggtttacacaatgttgtgtctgaattcgtgcactcgaggccaaacacgttgcagtctcacaaacaatgtctagtagaacacaaaataggaaggaaaattagaggatacaaaacatcgcataaaaataaattggcctttagggctcctccaacatacattattaataaaaacctacaacaactcaataaaacataagaaaattactaaaaactatgtaatttatgtaatttactctccttctgttcgaccctcttatactcaatagtgaaacattaatcccacctaaacgactcgagtgactcttcatttctacattgcttcagataatttagttctgcggtttcttcataaaaggcccatccttccacatctatagcaatttatagtgtttcacttcgatatacttcctccttattgtcttggacagatgtctttttcctttgaataagagagcatattcaacctcttgtgtagatgatgttgatcgatgattgttgaaaaaggcactactacaaaatggagcttctacatcggttaaaataaggtttctacgtcgggcccaccaccgtctttgttccaggtgacgttgtatgtcgacaacaactacgacggtcaccctacaaccgtctttgtaatgtgagaagacaacgtcagtgtgcagtcaacaacagttgtcatatacatcaaatcaacgacgcac

SEQ ID NO: 267 - DNA, 3805 bp, Glycine max
  source 1..3805: mol_type = unassigned DNA
tacgtctaaagatgaatatgtaagaaaacatatatcaaatttttgcaaagcaatttagacgatgactacagatcttgtaagacaaacaaagattttcaaagacaaaaatcaaatttgaaccctaagtcaatttaaagcacaaaagagaaaataaacaagataagacacatgaaattatattggttcatctaaactactgagactatgttcaattcttgacaaaccactaagtactactaacttcaactacttataagtatttatcagtctcactattaggtccttaactcaagctctataccaaacttgttacaatcaatattttttgtcctactaagtcactgctagctctaacatgaatcaaataatttgtttgtttgattgtacaatgactaatactcaattgtcttatagacaatagacaatcttagcccatagtcttttctctcaaaataatcaaagtgttttgagagaaattctaaattttataaaaatttacacaaagagctttttatataaaaaatttgaataagagcctttaagttggttcttcatgtctccaaaatttttagtatttagagaattcctcccatcaagtatcaattatatgtatacaaatacatttcttctattaaatttgcatctaaagaatttgactattgggaacatttaatgctaattacagattttccagaggtgcacatgtctcatcaatcattgcttgccgccacttaatgcttcacctggggagggagggaaggaagcggatgtgcagtgttaatatcgtttgatggcatttgagaaccactggcaaaaatatttttgtcgccagggaccatgggtccaccgggaaacacagtttttgagaagcctttttcaggctataccatatcaaaatagaaaaataacatagacacattggaccgaaaccgtatgtctaaatgataacacgacgctggtttatataaattgattatattgattacacgtaattagagaatattcaattcccctaaatcagatatcgaatcctatcaattattatacattaaatgaataatatttattcatgattctcaacattatataattcaaatttatgaaaaacaaaaatggataaattgttgagagaacaattcaaaatcctaattttaaattaatgtaggatgcatgatgtcatttaaatttaaggttaaattagttatttaatttctataattttacaattcttatctttttggttccaatagtttgaaagtgatttttttagttctataatttacattttaattcttttttagtctggtttttgtagtctttgtattttaattctcttttagtccctatagtttgaaagtagtttttttagttcatatagtttatattttaattccattttagtccttatcatcaaaatatgagtaatattatcaattacaattaactacaaaaatattagcaagtaattcgtaactaatttatcgtaagataatttataataaaaaaataattgataatttataattaatttgtaactaattatttttatatttttttgtagtaaggactaaaaggtaattaaaatacaaattatagagactaaaaatatcactttcaaactataggaactaaaagagaattaaaatacaaactataaggactaaaaagaacactattaaactacaggaactaaaaaagaattaaaatataaattatatgaactaaaaaaaccactttcaaactatagggactaaagactttctttagatttaaacattttatttttattttaggaaattgttttccctttcaatattaagatgtgaagtatataagtacaagtttttaagaaagatcacccaaccgagagagatctagaaaacttgtaattagaggtttattaagtttatccgtaaaacttttaatgtgagggttttctcaattttgttagaaaaaaaatcttataatggatatttattgaataagcacttcatggaatccaacccatgctagggaacactagtgcgaaaatgagattttagaacagttgtaaaagaactgttccaaacaaaagaaagtgggatttttgaaaataaaaacattgaatttacgacagttgtcagtgtttggaggtatgtgttgggttgagtttggtttctgtgaggatttgaagccacattactgaaactccacaaattgtttacaccagcttgcctatttgtagtacgacactattaaatttaattgttgtacagtgaactgtattttttaatttgcactaacagtgctagaatgtgaaactgtgttgttggttgaaggtgcgttgatatacaatagaagaaatatgaattattagttgtggaatacacacaggattaacttttccatcaatgatttgcaaaaaatagaagcaaaagttatggattccaagcattaattcatttgttgggctctgtaatgcatgtaacatgtattatgtatcacttttatattacaagcattcatgcactgttctttcccctgtttgggtttgctaagagggaattaggaggaacctaattactttattgactaggatatgcaccagctttgcagttttgctttcagcttaatataaataaagactaaagaccaagacctctcgtgataatgaatgagtttttttgggggttcatacatgattggctttattgtattgcatctctaacagaattttttattacttgatgatggtaatataattgaagtgtctgctatacagtttttgtgcatctgatctaaagtattctttttggtggggttaagattctgatacagttaaatcaagtctaattttagtaaaggtgattaaaatatgttgttagctacccttttcaagtttcaatctttaaagagtatgtgcttgtagagaaccgaggactacctcatacttgtctcttggttgtgtttattgcattatttttaaatttcaaggaaacatattatgtttttgtgaatttgtttggtattattgttatctgttcatagggagacaaataaataaaatgtattatataaaaaaattaaacattttagatcaattttagcaaataattgttttaaaaagtcattttttataatgattaaaaaaataattattctaaaaagagaattttaagaatggttaagtccaacaattattctaaaaagtcacttttaagaatggttatgtctaattgttatgaaaagtcattttttagaacggttatgtcaatagtcattctaaaatgacaatgtttttaaaacaatcataatatgaacttttccaaaaaggactttttagaatattttatattatgaccgtttcaaaacctaaatcctaaaatgtgactttttagaccgtttcaaaaatgattctaaaatgttatcactttttattatatgactttctacgacgtttgtacaaccattcttaaaagtttcttttgtagtactggaagtaacactttaataataacaactattgtgtcaacaacagtgttatttataaagtgattcccaatataattactcaagaggacaaccttttattgactaagaacactgatcttgaagagactaacgctcttgttttttctcttaataacgagaagagtgcacccgatcctcatggcttcaatggtttcttctatcaacatttttgggacattattgaagaagatgtgcaaagagttattctttaattttctcaaacaggatggctgcttcctagcttgaactccaatcttgctattctcattccaaaagaagaaggtgctgatagagt

SEQ ID NO: 268 - DNA, 4300 bp, Glycine max
  source 1..4300: mol_type = unassigned DNA
cgtcgtaaaaaatccctttttttagtagtgaaactactgcatcttttttggccaacccttctttcataattataccaaactcacatcaccatagccacgccatttcaaccacaatgcctcaaacactgacactaccaccaatctcgaccctccaaacaccacgtgcaccaccgtagccacatcgttccaatctgtgatcacaacaccaacacttcgtgaagtcgtgaaccactacgacttcccccttgcttttctcactaaggccatgttttcttctcacgcgcaaggacaccattgcaacaccctctctacacaacaatctcactgtcatgcacactaacaaataaacttcattcagccagcacccaccgccctagaatctggcatgaaatggaaccaataaaaattgtgcgatgtgtgtcataattttttgcttgttattttatacttcctcgagcatgcatgacatgaacctactggtattgtttggtttacattatggtcactagcagagatacatgtgttgtcatgtttgtgtccttatttctattgcgacaacaaaattttattgcatcatttttaaatagaattttattgtcgcgcctttggtccactggtcttcaaccatcacatgttcatagtctcaactaatatttatatgacatttaaattttttaatttataaaaaacaattgattgattatgttatatgtttattcctttatcaaagaagaaaaataatgaacaacaaaatcagatcttcaaataccagcatccaaaaagaaagaaaaaaaactctaatatcataaacaataacatcaacatatgagtccctaacaatgacggttgttttaaaaagaaaatgcatttaagagaaagggcaattacttatattttagagagagcaatgcctttcaatatcgaacaaggactgtagatgagtatagaaagcaacatctgaatgttgaatcctcttcccaattcaactatatatgtccatatagaaaaacatgtagatgaatatgcagatgcaaataaatagaaatttcagtaactagcttttgtttttatggaaaattcagtgatagcagaagaagaaaaaatgataaagtgagagcagaagaaatagaaattttgctacccggtccgttgcagcctctcctccatacaactagtaatctgtcactcaccacctgtccctaaaaagttgatatctttggaagagagtggagaatatcaaacctcaaaggataatatagtacaaattagaagttacagggagaagaagagagaaagaatgaatgagtcgcggtatattcaaatagaaaacggaaaaagtgtgcccgttactctgcttttggaagagaaaaatttgaagcacgacttggagagtgagtgggtagttaaatataaaaggaaaatggtctgcctgttactctgttcgcggaagagagaaaacttgaagcactaattggaacttggaagagagtgggcacttatctttgtattaatttaatgttatattttcattttttccaattttatcctttaattggtgttcatattgcggttgaagttgaaagaggataggagaatgatgtataattaaaggataaaaatgtcttaaaaaatatgtacattgtattatatattgttatacattatgttactttttcttgacttcttttcctcacgtacgtgcatgtgatatccttatgatgttcaccctttttcctttttatattgtttttcttttgttatttttattatgttaaatatcaaataaaaaactttttttattactaatatccatgtgtgcaaaaaaaaaagaagaaaagaaaaatctaaaaaagtggaataaaagtttattttttaaaaaaatgatgttacattttctaataataataataatagtaatagtaatataataagaagttttttgcaatagtcgctttgatgtaattttaatttggttattatgaaagctatttaaaagttaatgataatcactgtaaatgtatttttgacttgattattatcaaaacttttaaaataaataaataaataaaaagataaaaatgactaaaatatcaatacaaaaatattttctacaaaagaattatgtaaaactctgatttttcattgcacctaacgatacgtaggaataaaggatcattcccattgagcaaaaataagtcaaagaagataaattaaaaaacaaaaatacattcctctttcatagtaatacatttccttttaataaaaatctcttgttaaaatataaataaataaaatataaaatatatgtgtttgttttgaggggtaaagtaaataattttaagttactcaaattttatgcatttaattagaggtagtcgtctttatgacatacgttgtaggatgctaatatatttcctactagtaatggactcttaaactcaaaatctagttctaaagaccatttttttcaaaaaagattttatcaatgttttccttaataaacattgatggcaactcctttgatttttaatctattatgagatgatggtttgttgtgctcatatgtatactaatgttgacatatgtaaaaatcttgttttgagtgtgaatagtaagttttagagtgtttgggttgagatgagtgggccttaagtgatgaaaacaaagtaggtgaactaaagaagtgtgaatagaaataagcagaagagttttgttctcaatttgattgaatcaaaactgaatcacaacataaaatcctctcatttcactattttagcttcttcctctccaagacaacccacttttagagagtgtgagacctcaataaataaaatataaaatatgtgtttgttttgaggtgtaaagtaaataattttaagttactcaaattttatgcatttaattagagttagtcgtctttatgacatgcaccgtaggatgctaatatctttcctactaataatggactcttaaactcaaaatctggttccaaagaccatttttttctgaaaagattttatcaatgttttccttaataaacattgatggcaactcctttgatttttaatctattatgagatgatggtttgttgtgctcatatgtatactaatgttgacatatgtgaaaatcttgtttttagtgtgaatagtaagttttagaatgtttgggttgagatgagtgggccttaagtgatgaaaacaaagtaggtgaactgaagaagtgtgaatagaaataagtagaagagttttattctcaattttattgaatcaaaactgaatcacaacataaaatcctctcatttcactcttttagcttcttcctctccaagacaacccactgttagagagtgtgagacctcgaatccctagcacaaacaagattgtgactaagcttctttttcaaatttggactgattttagaggtaaaagaccctcatctttcttctcacatcctctattttcttttcctccataggtaccttcagaagtttcataaaggtgttttttttcaaggttttgatgtgttttatgttggtttttgggatttgggtggtatggatgatgtagaactaagtaaaggtgagggaatgcttgcatcttggacccaaagttccatcctttctacttttcttcatctcaaagcaagtttcttgagtttgataggtaaggaaagctttaaactaacttcaatcatatgtttgatgtgttggatcgttgttttagattattaatggtgtactaattcgatgatcatatttggaaacaaaagatttgagttggatatggatttggggtgctaagaaggccctcaacctagtgctagaggttgttagtgatggctaacaatgctaagaatggatgagtgagtgaatccctaaataacttaaggttgatacaagtcttacaagaggtaagccactatccatgttcatccattttcaataaaatcacacttcctccatgagattaatttgaaccttgtcaaatggtcaaagcgtgactatgttaagggatgtacttgggttaatcgctcaaggtgaaatctacatgagagtaaaaagtcaggatgacatgacataattgttaggcatgtacattaataattgtgacttaagaatgacgtgatacttggtgagttgtataactacattggtataaaaaatgtgaaggattttctatatctttcttaaaattgtgatcttatattatttcaattatatgatatttcttttaaaatgagtttacccttacgttttttgttaaactgtgataatcgtgtcatttgacatggaagaaaatt

SEQ ID NO: 269 - DNA, 5401 bp, Glycine max
  source 1..5401: mol_type = unassigned DNA
tagatgtttttttgaggtcccgagtctcattttaccctgactgtttttcagtgtactctgctggagcacttgaatgtgtccccttcccaactccacccaaacatttaggcgatggtgctagcctttgaaattctgtgccttttcttcaacatcctgcttagtgtgtcggtcttcttattctactttcaaatgaaacataatggcaagattgaatgggtcttcttgaataacgtgtccaaaaaaatgtttgagtttgattcaaacatctttcgccgttttaaggagtgtttctttaaagtcttgattattggtgtcgtggctgatggtatgccactgatgttcaacagggacaaggagccttgcttctctttctactagcagtctaattccactaggttcaagttgtatgatgaggatttgctaacccttgtggagaggatcgtcaaagcgattttggagcagctatcggcctcactggacgcaaggatttgctacaccccattgccacatcatatagtcacactttgtgcatgtccttcatgctttacatgccttatgatatctaagcacacttagtggagaatcttggacttgatcttggattagtgggatgaaccataactaaaattcactaatcataattagtgaaattttggctccaaaatttggctccacaaattcaatttcaaatccaagtgaaatttgaatagaaattcaaatttccctccaattttgtgtgacacttaggctataaatagaggtcatgtgtgtgcatttttttcaactttgatgatttgaaaattaaacttcagatttcagagctctcttagagcacaaaaattcatgctcttctctccctttcccttcattcatctccttcttcctccaagctcttatccatgacctcctatggtggtgagcttcttctagactcatcttctccttgaagtggcgtctcctctctctcttccttctccattccgctgccattcatcttccaagaagcaaaggaatccattgatgaagaagatcctaagcctacaagctccaatggagcttacatcacctatttgttggggaaccggtctattgaggaccaagcgtccgcactcctatagcagagttgacgtcaaaggttgacacgtgtctcaaagtgtcatgttggatgccacgtctattttgtctgtcctggacaatacacatgtattattattataagctaaaggcacaataatatttaaaattgttgcaaagataattatgagtttagatgtttttttttttaattttcataatttggtatgttaagcttatttaaatttaaatagcaatatttaagaagaatagaggaacaaaatatgatataatttttatgattaaggaagtaaggagtattagataaaaaaatatttaaagcttttaattttttttttacattttaaacctttttatctaatttttttagattattataattgagtatttggccaccttacgacacgagctgacgatagtcctgcaccacttgtgtctgcatttcaaaaggcatccctttcttttaagaggattcgtgacatgcgaagtcttggtaaggttctttgctttgcatcgaattaaaccacatgctctattgcttgtgtgggtccataccaattccttcaagtttcattcttgctaacatactccctagacgggatacataacacgttagctacaatattgcatgcgtcgatacacacaacacttagtatccattgtttacgactaggactactcgggtatctaatctcattcactcccctaactatcgtctctcaatgtcagtgtcaatcaacatagtactttattgttggtgttcttttttatatctatgcatttcactgtcccactggaaattccctttgcctttatcgtacttcaacttggtagtttccaccatctatctagggtaagttctattagcctattaggtagggatatatttaattgaaagtcttcaaataattcaatagtaagaaataatttaattaggcctaattgcatattttaccccaactttttaatgattggagaattttattatcaaaaaattaatttgatgcattttacctcaattttaaagaaatttgtgaattttatcctctatcattttactcataatataattacactttttagtcccattttttttttatttttttgactaattttgcacccaacttttaattgttttttagaaaattttacttctagttttttttataaaaaattttggcaaattttactctcaacgtttgtgcttattaataaataaatgaaagaaagtataattcacaagttttttaaaagttgggggtaaaatacattaaattaatttgttgggggtaaaattcacaaaaattaaaaaattaggagaaatatataatatatacaactatattcaatacttgaaaggaaaattttatcaccgataataacattgtgagtctcaaatagatttgcctccaatggaaatgtttggaaaactcttttaagaattttcaattaaatctctatatttgatgaaattctaacatatgtttgaaaatggtgaatgaagaaaggaattaggagagagaaggtatctaatgtaaccgagcaaacgtgggaactcggcattgtggaagtgaggatctccaaaaaaaaacctaccctttcttttgaccactctctatctctaaagcctcactcttgacgagtttttactcttttgctaccacgctttctctcactacactctcactctctctctctttccaaatcacccttgctttcttcctttccctttctatcccttcttctcagatacacacaccactgcggaagcaccaaaataagaataagaaaccctaattgcacactcttcaggtgcgtgtctcactctctttttctttacccaactaagtccactcccccccctctcgtacgggggttggttttgttatgcgcgatgatgacgtggatctgcttgttctgttgcagggaaaattgaggaagaaaatttcgatttctttcctcttttatttggtttttgtttttgtttctgtttcgagaaaactttgattttgaggaattaagggttgggatttatgtccttcaatcaatcaaagtccgataagagcgacgctgtgtaccgaaaatccgggcgatccggcagcttcaatcagcagcgcggtcccttcggcggtgcgtacggtaagggcggcggcggcggtgccggaccttctccgtcgctctcctctagccggaggtgagttttaagggtttgctaattcatattttttccgtctttttctttcatttttgttgaactattgcgtgtttttatgaatagtagggggatatggggttgtgatttttatttgagctttttttcttgtgtggtattggtttgtgttgttttcagtgtggggtggtgtggattttgaaacttggtttgtttcgtggtgacctagggttatatgatttgcgtgtttttttagcgattcttattgattcttattgttgcttgtgttagttttaacaagaagtctaataataatgcacaaggtgggcaatctagggtaaaccctactccggtgaattcgaccgagtctaatagtacttatgcagcccggactgtaccaaacggttcctatgtacagccgcagattcatggtaagcttgatgaagatgtatcatatatgtgtttttaaaaattggtttttgagtgcgtggttatgttgttgagtggaattatttgcattccattttgcaatggaagaatgagcagattttatgtatgtgtttgactgttttggtaaaatgtgatagtcttttatggacaccattcacctatttgtgctgtacaatataggaggatcggatgcaccaattacaaatgcaactgccaagtcatctgaactgttggctgcacagaggagctccagagctgttccaaaagctcctacttctcaacctccctccatgagtcctgatccagcagctcctacaacccctgctaagggtatgtcactcttctaggtttttaatgctgtccataaagtgcagaataagttctatcatttctgaattgtagtttggggtcatagtgaagtgacatgttatgaaataactttttatccattacagctgacctgtgagattgatctgtatgttgttttatgccccagcagatgcatctaaggcattccctttccagtttggatctattagtcctggctttatgaatgggatggcagtaagtttcttagctgctaatttcttaccatccacctgaagttaatttttgtgcattacataatgcctggaattatatgggggttaatcatgttttgttattacatgcagattcctgctcgcacaagctctgctcctcctaatatagatgaacagaggcgtgatcaagtatgcagattattctctgctccttcctccttgttatatgtacaccaatatagatatagatttactgtcactgcctaataggttagaaggaaagatggtgtaattggtgatcactgatttcaactcctctattgtcttggaaagttcattaggattccttttacaaaaaatagaatctgacaacgggtcatcgggtgcttttatgtttttgtactcagtctagaagttgttttcttcacttgtttacatactaattccagtatttgtttggtgtctaatttcaaacttgcaggctcgacatgattctcttagacctgtaccctcaatgccaacacctcctgttccaaagcagcatctggtgaagaaggatacaggtgttgctgaccaatctaatgctggggagattcatactgggattagggcaaaaaaggatactcaaatgtcaccattacccccagcaagccagatgcagaagccttctgtcatttctttatctggaatgtcaatgcctatgccatatcaccaccagtcacaggcatctgtacactttggtggtcctaatccacagattcagtcatcggcacctcttcagatgccattaccaatgcctttaccgattggaagtggagcacaagtgcaacaacaggtttttgttccaagccttcaacctcatcctatccatcctcagggaatcatgcatcagggccaaagcatgggtttcactcctcaaattggccctcagttgacccatcagttaggcaacatggctattggaattagcccacaatatccaccacagcaaggaggaaaatttgctgctcgtaaaactactcctgtcaagataactcaccctgagacacatgaagagctaagacttgataaaaggacagatgcatattcagatggtgggtcatctggttcaaggcatcattctggcatgccttctcaatctcag

SEQ ID NO: 270 - DNA, 7000 bp, Glycine max
  source 1..7000: mol_type = unassigned DNA
ctactctagaaccattctaagtttctctttgagtcccagcttgcttttatgtgtttttcattgctttaattgttgaaaaatccctgaaaatttgtcttgttaaaactctattggtttatctttcatttcattttttgggtctttggttattgcttgtctctttgtttccttgattgtgagttgccatatagggaattggaaaggaggattggtgccatcccttgaagaatttgagtcaagaagcaagggaaaaaccaccttaagagctattggactaagaagcactccaaattgagtgaatcaccaaagagagagcaaccaccaaaattgaggaccttgttgtaattttgtaattgacaatttacttactttcattgctttcaaattttgtaacaaaaaggcctttcattggaagtaagttgggagcctccaataggtcaccctacttccatttgtgtgtaataatgttaggcaattttcccttaagattgtgagtgttttgttgggaaccttaaatgtggtcatccaaacactcttaggattcgcctagtttacatttcttacttactttcatagcttatttcctttaccttccattgtcaaaccgcctagatagcttgccttttaccaattagtttttaccttatctttcacacctcttttagtgtttattttggctagtttcaaccatagcttcttttagcttttgttttcaaacccccaacaagaaagaaccacaacttaggaaccaacatgagtcttcattcttcatctagtgttaatagtgagggttctactcctaaggaccccttgtataagatattagatgagttgagatcccttaagttgttgaaataaaaacaagagagaaaagaaaaaggaaaaaaaagagtggaagaaataagtcaagatgaaagagagaaaataagagaggaagaaagaagaaaattaatgaaagaaatgaaaagagaaaaacatgcctcctatagtagtcataactcttgcaagagcctaagtgaagaacttcatgactattatgaaggaaggaataagtcacatcttagatctcactcatataggagagaaaatgaaagaaagcctcaagaggctaacattaacctcccatacttccatgggaaggagaatgtagaggcttacttagattgggaaataaggatagagcaaaaacttaaaagaaagtctactttaaaatcttatggatctcattcttatccaaagaaagaccaaggtctaggcatcttaggggcagcaccttctaagcccaaagatgataaggggaagacaatagaaaaacaaccccctaaggctagtatgctagaaaagactagctctataaagtgctttaaatgtcttcgaagaggacacattacttctcaatgccccaccaagaaaaccatgattatgaggagccaagacatttatagtagccaagacaaggctactacttcaccttcctctagtgaaagtgaagaagcaaaaggggaagaatttagtgaagaaatctatccccaagaagaaggacaacctttaatggttaaggagaagtgtaaggaggtaagtgtctcctccaagaggttagctaagaaggaaaggcattttgaaataaagacaaatattaaagaaatttcccctcttagacaacctccacattttctcctttgtaaaaagacacttgttagcattgccacacctcttaggcttgagtttattcctcaagtaaaggagttattggatggaggtttggttcgttagagcttaaatccttgtgctttgttggtgcccaaaataggtattattaggcaccaaattcctaaaataggtggtatgatgaatgttttgagtggtgcaaccctcttttgtaaaatcactcgtgcacccaacatcttcatgatttgtgtacatagggactcattaagtaggtttgttcttatttttagtttcaatacaaacttagatactcatatgggacaccttaggcttgtcatacttttgggtaggaataatcaacatgaaaatacaaaaaaggtatgttttattgtattacttttcttaattttttaaatagtgatcaaggggttcccatgaacactaagagaataaaggtcattcctgagtggcccactcaaccaagtataaggaaaatttggggcttccataacttcacaaagttttacaaaaggtttgtcccatatttttctatacttgtagcaccactcattgagttggtgaggaaccatgttccttcatgggaagatgcccaggaaatgggttttcagaccttaccttacttcaacataccaaacaccactaatatatatgtttttgttctttttacaggtgttgaggaaaaaagcccggagtttcaagaacctcgggatttgaggtcaaatccttttcaaggggggagagaatgatgcaattctaccctgcaagggcattagttagaagactccaagtagattgggccagagatgcaagagaaggccctagggttctcatgagacttagggaagattttgggcccatgggctaagtatgagtccacttatctttgtacatattagattaaggtttcattatttttggactccataatgtaggaaaggtaccctagaaatgtaggatttttcagcccttgtattttagggcacctagactagtttttgtattaggggtagttttgtaatttcacaagcattaagtgaatatttgatgtgtgtgttggaaaataaatttaattaaattgggagaagcccaatccaattaaattttagagggggaggtgagcattttcttgctacaccctattgtcacatcatatagtcacactttgtgcatgttcttcatgctttacatgccacatcatatgttggacttgatcttgaattagtgggctgaaccatagctaaaattaactaatcataattagtgaaattttggctccaaaatttggctccacaaattcaatttcaaattcaagtgaaatttgaatagaaattcaaatttccctccaattttgtatgacacttaggctataaatagaggtcttgtgtgtgcattttttttaactttgatcatttgagaattaaacttcaaacttcaaacttctttagaggcactaaatttcgtgctcttttcttcctctcccttcattcatcttctcctaccttcaagctcttatctatggattcctatggtggtgagcttattctagactcatcttctccttgaagtggcgtctcctctcaactcttcttcttctccattctgctgcaatcatacctcaagaagtaaaggactccattgttgaagaagatccaaggcctacaagctccacatggagctacatcagtggcttggtagaaaataatacttgggatgtgaaaagcttgttataagatttgtgtaagagctagaagtgatggtgaaaaatacttgggatgtaaaacttggtgggtagttaagaacttgacgtagtttcagtgataatataaaattctatgtgcatttgcttttcttgttatttgttttcagtactaactgtgggttgacatttgagctattttgaaaacaagtttttcaatctattatgtatcatttatctcttttttcttaagaaaaccttatttcttcatttttaacatacaaatgatatctttgttcttagaaaaaaggttgcaatttttttttcaatcacaattcaatcccccttgtgatttttgcctttatacatgtgaacatgtttaaagcaatttcaaaactttagatcaataagagttaaattgcaaaacccaatcatgtgaaaatttctaaaatctaatataattcaaactaaagaaaacattttcacatgttcgaaatcatattaaatagatatcaagagtctccaatgagtttagaaaataaaacacgggttcaatatgtcattggaagtccatatttttaaattgtgtttatattgagagcaagattaagtcattggatcaaaccattacatttctactaagatgactacataaataatattttatcaaatcaacccattccaaatatccttcatcgccaccttatataacttaaaaataatttgacaaccatacatataagaatttaatgagtcttgtataaaaaaaagataataaatatcaacaaaaaagaaataaaaaattaaaccttctaattatcagggtcttgatagtactgaaaatctagataccaatcacgatcttcaaatagaggataatatatttcttcaccaccgagatgaaaaatacgaagctcacaaagatcatcactattaatgtttaaaagcaagatgtgttttccaagaagtttgtagagacatcctaagagatgaagcccatgattgagaaaagcaaggtctccttcaatttccaaatcaacacgatgaaaaattgattggttgtcttcaagttcaaattcatcaaatcgtctatttgtagttagttgttttgctaatgaaaatggaagttcaatcttatcctacaatggttgaaaataaaaaataatgaatgtacatgataacacttatagttgaagaattatgatattacacataccttatcaaggtctaatatgacttgcaaagtacgatatgcaatgaaagacacataaacaacttgcagttcttaaaatttatctatccttgaacatatacctaatctcaggtcacattatcacaaacaaaacacaccagtcacgaataatttatgcaccaatcattaaaaagattggctatgcaaacaaaaaataagaaaaaaaaatctctattataagagtaagaaaaggattaattttacatattgtagtagtgtattgatttgaagtcatgaaggaaaactcactgcaggatgaaattggtgataatagactaaatggtatgagtacaatgttaacaatgcaaatacaaacaaagaggaagaataaaagggaaagagtgcaaaagggatgaagaggttcaactctattcaatgaaatgaaaagtcttaatgtacaagagagacaaaggagaaatataaaggaaacatacaataagactaaactacctttactagtatgtaaaataacaaaaatatatattattaactccccccacaaactcactatgcatcaacaggaagagtttgctagttaagaagcgaaaacacttagtggaataaagttttgtgaacaaatcaacaaactacatggaggaagagacataaggtaaagtaatggttccctgaagataatgatgtctagtataattacaatcaatctcaatatgtttggtgcgctgatggaagaccgaaattatgactgattttgatatcacttatgttgtgacaatgcatggggtcaatgtagaaagagagatacccatagagttaagtaaccatctcaactagacaatctctatagtagtggatgtcatggctttgtactcgactttggttgaagatttagacacaactacttgcttcttacttttccaaaaaaaaaagagaatccctcaaaatgatgcaaaaccatatggtagacttacgattagtggaattactatcccaatttgcataagaaaaaacacataactccaaggaagaagatgaggcaaaaaagaaaactatgaaatggggagcctcaaagattgcaaaggatgtgaaaaataactggccaatgagttgtagtgggagaaagaacaaactgactaaccacatgcacatcgtaggcaatattaggtctagtcatggtaagatacaccaagctgccaacaagagtacgatacaaagtgggtatattaggcattacatatgctcaagaggggtctccttggtttgagtgttaaagagacgagcttgatcaaggatgttggcaatgtatttagattgagagagaagacaacctctaggagaatatgcaacttcaatgccccaaaagtaacaaagagtacccaaatctttcatctcaaaccattaagccaattgtaattcaactccattatcccatcaatatcatcccaacaataatcatatcatcaacatataatgatagtagtatacacccaggagaggtacacctaacaaaaaatgcaaaatcatggggactagaatgaaagccaagggattcaatcacaatggataactttttaaaccaagctctaggaacttatttgataccatagagagatttcttcagtttacaaatttcattcagattatgagagacacctgggagagaaaccatatacacttcttcttgaatatcaccatttaagaaatcaattttaacatccatttgtgagatatgaaattgatagacagaagcaacaacaatgatagtgcaaataatgatcattttggcaacatgagcaaaggttttttcataatccataccatattgttgggaaaacaccttggcaaccaagcgagctttgtatctctctacaaacccttcaaatttggttttcatcttgtaggcccaatgacatctaattgcactttttcatggaggaagagagacaatatccaaagcatttgtcttgtgcaaaatagaaagttcctatgctatatgttagaacctaagacattggatgatgtcaggtccctaaatctctatgattttttataataacaaatatattagattttgtatgaaccgaactaatagatttcactcagttttattggaactacaatgtccaatcatgtgttggtaacaaattccatagcttaagtattaattgatacactcttttatcatccaaagaattagtacttgttttacttataggggaaaacaatgtccaatgagttgtaactaaacaagtgtccaagaatctttgtgaaaaccaacatccgatgtgttgtgcaatttaaatgttcaaaaagggactaactaacttacacaaacatatttatatccaagttagttaacgtccaatatgagctcgtacacttgcacactcacaagattgatacac

SEQ ID NO: 271 - DNA, 3169 bp, Glycine max
  source 1..3169: mol_type = unassigned DNA
agtacacgacatgaaatcagtgaaattaatttcccgataatcaagtatgcactcagagaacaactagaaatacattgtaccgaaatttcatcaaattaaataaaataattttaaccttaacacatgaatctaccataaaaatatcagtctccccaaactgtccaaacggacaattcaagattgaatacaatgattaatgcaaactgtctgcaagaatcattgcctccagtctcaaacgggaatctaaggttcactcatcatgaacacaatttgtatagcatatatcaattgtcattaatggcagtgaacacgtaataaaaatattaattggtaacaagcatttgtacctatgatgatgagcagtacaatccaaaatgaaagcaagaatcaaagaaataactgaatgaacacctacatcaatcatcattccgaaaaacacatatcaatatatgtgtgtctgtgtgtgtgtgtctctaatgagggtgtgtgtgtgtgtctctatgtgtttgatttcacatgttattaattaaggaggtgtgactaggttaaataagacgacaagttccctacaatgtggagaatctaatccctacaatgtggagaatctaatagggaggacaatgctacactctatatttcctccttcaaaaccaaaacatcccaaaattaaaacatcaatcagaacttagaagcaaaactaataaacagattagaggaagactagagaaaactctaaaagaatcattatgaagggctttcatcgaaacagatttccaaatatttggtttttgacagagcataatagcatcacttgatcaaagtagcagaccccgcctagtgggtaggagacttttgttgttgtgttgaatgaatcattagtgcgttccatgaattaggaccaatttctgattattaggttatgtctttatgaaggtttgtgtgtaaagcctttgtttttataccactgactttccaaactatttttagagaatttcattagaaactgattttaatttgttaagaaatttcctaaaaagtaggagtgggtggaagtgatgtaactttgtgttaatggaaatatttattttttctcttcctgtaaatggaaatctttatttttgtttccaatccaatggattaccaatatgccacatgattgaccgtcatcaaagtcaatgaatgtattattaacacttataacatagtaattcataaatcccaattaaatccatctttgaggtattgaattctcgatgccagtatcttagagagattaatttatactgactttgagctaaagcgcatccttgattttaaaaaagaaaattagaattatgatttatgatttatgagccttttttttcctatcttccttctctgtgttggggtggatatgtggggaacacaggggaagagtggcaatttagtttttgaagaaataaccaataggatgtgtttagaagaaagctcaacaagaaagctctctttttgactggtttttgtttggttctaagaacggatctttaaaggtttggattttggttggttagttatcatttgctggaggttaggtttggttaaaattggataattttgatataataaatatgtgtgtttaaatttattttaatcataaattttatattatagtaatatacgtcaaggactagcattaagtttcattatgttgttttcttgcaaaataattgtagtgaagaaacattgatgcttggtaatatggtatgatggtaccatccccattccccgccacagcaattgtatatttctcaacagctttacattcagggcaggggtctttaataagctgtaagctcgaaaacaaaggatatgcaataatagttattttttaaattatttcaactttgaatgtacattgagtaaatcatatttgatatgtatctagtttcttttttggatatatatttcttattgggaaatcattgttaatttgttattcaacttaccaaaagatggcacgatatggcaatggcatggccaggggaggttgaatggggtacttttgttaaacgtggctcttataaaacaagactgttaggagtgtgtatttttttttttttaaatagtaacaccactcactcaaattcaatactcatttacctgaacaaaaatataccaaataagagaagatttggatgtcacccgcaggccagagctggtcggtctctgcttcatcagcctagctaattaggtaaattttgtgtggcttggagtattaatttatttttctttttaacatacatactttgctttatgtccataaattggttttgattcattgcctacataaactgcaactataatgagcttccccttggaaaaagaaaattttctagtattttttaatatcatgtttttgttgtaaatttcaatttcaatattattgcatgttgtgaattcaccccttgctgcggagtcgtgttttatttacttgattgggcttttatcttcatattgggttttttatctttcttaatttgcatggtgagcctgatggcttaattctaaattttggttgttgcatgcaacatggaagcttatgtgaagtgaccagatggaagaatgaaaatgaggagtacgatggtgtggggttttgtgctgcctattggtgcaagaatcgtggttaactgagttttattaagctactgaagtgaactgagtggatatggcttctatgtgcatcagaaatagccaagtaaaattctgaagaactacttactaccttggtattcaggggttgttcccagcttcttccttctgttatcaattattttactatagtacagagtaacttctttttatgatgcaggctaagaattttctaccatgtaggagggaattcgaaccatgttactcaatttaattgacaaaactctagctaccacacgagtaatgttttttagtggacttagatatctcataattgaaaatgacctgctggtacataattcaaaatgttctaaccaaaaaaaaacaaaaccatttttattaatcattatcctaaaaactaattagtggggtactagaacaagttcaggctaagaagaaaaaaaaatggagattgttcctgtcatgactgcctttgatctgattcaaagaagtttttcgaagatttccctgtttgatgagt

SEQ ID NO: 272 - DNA, 3700 bp, Glycine max
  source 1..3700: mol_type = unassigned DNA
tgtctaatgccggagagcattcctatccaattccgttagcaaagaatattcctagaataagattaggaattctgttaggcatatgcactatatatatgagtatgtaataaccaacaaatcaataagaacaattacacttttcctgcctttgcccggttctcccttttattctcggaggtactagccctcgaagccagcattaactctttttccacgtatcaattgtaatccctcgtatctacatgtttgtctttcctaggcttgctttagcttctagggatacatttttcactttcataaccttttaattaaacaacatacctaatgtagccaaggctccctcccctatctttaaattttagcatacattgtttaattttttatacaacattttttaaaaggaggtgttacaagatttaaaatttaacaaaattgataaagaggtgaagtagtcaaaagggaaaattattttaattgaccaactggccacaagagctgaaaaaataaaacataagaatacaaccataacatatcttaacaagagcgtgcattgaaataaaaactaaaatgttaacaactacaggatctaaccaacattaaattgagtgagggtagtaagatccgtagttactaacttttccacatcagctggatcaacaacttcacaccgcataaaaaaacaagaccccaattatattctatttctatcagattcactccttcaacaaaattatacaagactatttttctagtccacttacttctacgttgaatgctcccaggtggaatccagtatacccttcttgaacggtgtcaacaagtggaaaaaattatgggtacctgtagaaaaattttaatgtttaaagagtaaaaaaaaaaaggtctgggaacaccaaggtgtagatgagaaggaagcagagaaaaaaaagcatagtctatatcgttccatatggcatggcatgcaactaaactagaccacagggttcaaatctactagggatcactataagtttttcttctatgaaatatagcaagacacatcattacgaacatcagtctttcaaaaggattaagtataactagtaaaaaagaaggcgcagaacaaaagccatgtgtgacaaacctcgcaaataaattttgtcattccaacacccattcttttgataatgtccacaattgcatcctgatagctgcaaaattaatcattgccaacatttaatttgtttgtcatagaatgcacacccataactctaattacatatataactctaaatgatagtactagtatttggtagagcaattaaatatacttcattaaactatgaagaaaacatgatgcttaatgcaataggtgttggaaaaatataccttattttagtgagtgaacataacatccctcacataatctctctctctctcttccaattttggtctgtgagtggtaagggcacaaggcatataccaagaattcttccaccggatctgcttgtttccaacattattaaatgaaagtaggaagcaaaagaataaagataataactcatactaagttcttcagctgcttcaaaatttgcccacattagcacactagttcctctgaaagatcctccactagaaagcaaaagattgtaagctcaagttccaccgctagctttcttgtgtgctcaagttctctcaaatcaatgaagcttgaatttttcaggtgaaatgatctaaccatatcattatctacatgcaacaaaatatgaatgaacactagaagaaaatttggttgataaacaaaatgatataggagggaatcaccaagtagcaatgttgttaagtaattattagagagtttgatacactaaatttcaaaaccgaaacaagttcttttaatgcaatctgcaatttgtcagtgctttgttagttaatacaaaaaaatagaatgcagaagaggcgttccttaaaattgacttttgcaaaaaagtcctggagaaataaaaagtgagtcctgttaagtgcattagatgtgtggaccaatctaaaaaactaataagaactagaaaaaacatgtttgactaaccacctcaagctagggctgtagagcaagcttttgagctctatcatcttttaactgctaaggaataacttcatagttgcacatgtaaattaggtggattctaaacctataatagagtttttatcattttgaacctgctctaaatctgaccttgcacaaaaatacaacacaaagattagtagccaaagtgatttcccatcataaagagagaccaatatgcatactcatacttgtattccattttccctattgtacggtccaaggtcaatatcgcttgttccattttctcacctgttaactcgagagatttttacatgagctagctaacatttagagaggaaacaacatagctttttattattttttataaaaaaaacattaatcaaggcactcacatgatcaaataatttgattattcaaaggattacaaagcctagaataaaaaaaaaattgaaatggtaagatgattaaaatttgaatgagaaatggcaattggaatttggaagaacaaaaaagagcaaaagccaaaataaagtgaaatttaagtgagaaataagaaataggtagcaatctaaaacaacaagtgaattccagtttcatatcctattatattccaccgaattccctcccttgccttcctaatcctacacacctaccatgagtgtgattggttacaacttaccattcaaaaacctaagatactctctccttgcatcttaccttatcactagtacgagctactaatcccctagtatccgttctatttcttttaacatcaacttagtaattgtgctagacaaaaccagattctagacataataggtacggtggcaataactactacacattttaaacatcgtatcaccatcacatctcatgattaacaaatcatcatcatttcctttgtgagaactgatgtgtgctccaattcataaaaaataattggcaaaaatatcaaattgggtcttttttataatttttttttatcaaaatgggtttgttttgtaattatttactctacaggtctctttttttactacaacgcgcctacccgggaggaagcggtggtctgtcaggcacgaccactagtggtggcctgccaggcgcgaccactagtggtagcctgacacttccttcttccctataaaacccttcgtcctccgtttcatttgcgctacgaaatcgttaaaataaattaacatcaacaaattactcaaaataaattaaattactgtaaaaaaatttgctcaaaactagtatatattttttatcttcgatatattatagcattatttaatatttattctgttgatgataataatgattatattttgtaggtgcataaacaaattgacacggactataaaatgaaatagtaactttgtttatattttttgtgataaatagtaattttttgtaacttgataatttaatttttggttataattatgttgtgtttatatatgttatatttgtttgttgatgacaacaattatttattgtagtagtttttatgtccaccacactattattattagtagttaagctcataattattgatgttgttggtatatttttttaatagccaaaatttacatagacgttaaaaataaatgccgattattttgcatcatgagt

SEQ ID NO: 273 - DNA, 3978 bp, Glycine max
  source 1..3978: mol_type = unassigned DNA
agaagcatcccaaatgatagtatcattcatgttggggttgataaaaatgctactgataagacaagagactgtaatgttcaaagggcaccttgagaatgaatatccttaacctcctagttaacataagatatattaacataataaaccaaattgcagagaggaccttgaggaaaccatctatcaaaccaaacaaaaacaaaacctaccccaattctaaatttgaacctaggttgaaggatgacaaaggacaaaacctgccttgggatgattctttgaaagcaattgaacccaaagcttattgggctcatgtaataaagaccagacatgcttccccaacagggtgccattcatctcccttgctgttctaatccaaaaacctccacgagtatttagctgaatatgagaggaaccctagataaaggttctcgtaattttgtcaatttcatcacgaactctattgggaagaagtgaattttgcgtaaggtacacatgaatagagttaagcatagacttggctagagttgtcctccgtgccctacttagtaaattcaaattccaaccaaccaatctactctttgctctgtcaattacatattcaaagtcgctcttcttaattctgctagctagaagagggaagcccaagtaccttcctaaatgcatggtatggacaaaaccaataatgctagtgaacttctccttcttacccgagagatattcctagaagctaggaacttggatttttgaaagttcactttaagtccagaagcctttcagaaatcatgtagaaaactttggactaatctcacttgagaagattgaggtgaaaatgaggcttatctacaaaaaataaatgagatattttaatcaatgatcttgagttttatgaacttaagtctttgatatgtaactctattaaaaatttagaaggaaaatttaatcattcaattcggcttaaacaagattttcttcaataaaaaatacatgtgatctaaaaaattattaattcaaaatatataataggaaatatatttacataaattacacactaaacattattttaaatacacaatactgcaattgttaataattagtttcacatgccacaaaaaatcatcatgagtttataataaaaaatagctctgtgttgatcatcattttttacaagctattgctttgcaagaaaaaaattggtaggcctatggtgtgtctgatattcgatttgttttcaaaaatatacacaatgtcatatctgaactcatgcagtcaagaccaactgtttgagctacacaaatttataatgacaaaatgaacaaagattagacaagaaaagcaacaagaatatgggaagaatactgatatgaattaggaacagaaaatatttgtttgatgtggctcaaattccaagttatcaattatttgtatagtactgtttgtaaaattgacctttgacaaaggttataaatagttttagatttaaatttattttttatcttttaaatttgaggtaatcttatttttggttccccaattttaaatttacttttttagtgtttctcaatttatttttttaaaaaaaaaaatctttttagtccctctccaaaagaaaacctatattaatttgggggtgattatgatgttttttatggcaatggactaaaaagagtatttttttaaaaaaaaaattggagaactgaaaaagaaaatttaaatttgggggactgaaataaaagtaatccaaatttgaaagatcataattatatttaagtcatatttttaattctcaaattaatttagataatactaataaattcatttgattgaaaatatacaatcatttagaacttttaaaataacaagaaagattataaaaaggaaaatattattaaaaaagaaaacaaatgatacttaagtatattatttaaaaaggagaaaatatacaattatctccaagataaaagactataaaaggacacaacaaattcaattaaaattaaaaaatatataaaatagaatttaaatgtcatgatttccacaattagagccccaaataaaaataggaggttaatttctaggcatatgtactgctgattaataaaaaattatgatagatataacttgtaagtttctttgtgtaatttaaaatttaccttgtataataaatttgtttatttttatactaattatcttacaaataccacttataagataattattataaaaattatgatagatatacttgtaagtttctttgtgtaatttaaaattttccttagtaagtttgtttatttttttatactaattatcttacaaataaaacttataagataattattataaaaattaatcatacattacaaaatttaaattgaaaaaaataataatgaaagcttttgttgctggctttggagaattagtcacattcttaaaggagctttggagaaggactcaagatataagtattgggtaaggggaactttatgaaactagtcttgaagacttgtgagttgttttatgttattatgttgatatgatgattggtgaactctttttgaagaatttgaccttaaagtgatgttcttggtgaaagtttgttgcttgaatgttgaagtgtgatttttttttcttcatgtttttgcctcattttgtgtcacaaaattatatgctactactattttatatgtttttatcttcattattagctagaaaaaatgtgtttatatgttgtgctatgatgaatttttgttttggtacgaggctttgatgatttgaagcaaaaagcctagaactttgcgagacacaacttttgtcctttggacaatcactattaagtttaaaaaatttgtgtaagtatggattaagatttaagaaccataataatttagttaaagaaacttcataaaaataggaactttgatgaaaacactggctaaaataaattattaaatcttattacggtaagactgacttaataaaactataagtcattaataatggattactgaacttgaaaagattggattaaaggcaaagtaattagaattggttttgaaacctaaattgaaattttggttaaataaattcactgcatttgtattccaaactcaaataaagatgtaaagtcaaatatcacacaaacgtgaataagaaacatagacgagtgtgcaagaatcaaacaactagctattatttggggaatctttttattcctcggacaaactttgaatcttcctaaattgttgctttaatcatgcatgagtatgcaagaatcaagtaactgaatcttctttggtcatgcaaaaacccccaattaatgtatgattgaaaattgaagcataaacacttttcttgttgtagtaaagtagcagcctacatgcgtcgtttgcaaaactgcttgggttgctaacgtatgatacataacttgcgtgacgtgatcacaccaccaatatgcaaaatacaaattgcaccaactctcagacacgaatcgacaactcatgcgtgttttgattcaaaacaagatggcaatgggaagggactgaaaccgatatgtggttccccattcctgcctccccaaacacatccccgtttcctacatatatatagtttttggagtgctgctaggtgtacccagcagttttgctggtgcacccaacaattattgtgaaaaggtcataattccctcactaatttattttttaaaatgaaacctctctctctctccccgcgtttgtgcttctgcttcttcttctttcggatcaactcttcttcttcctgcttcttcttcattctttgggcgtcttcttctttattccttgtgcgtcttctttgtgcctcttcttcttcttcgttgaggaggttgccgccattgttgcggtggtgctgcaaggaagcttctgcgaagagcaacgatcgttgaggaggttagtgcgtccaccgtcgaggtaagcaccgtgaaccttacccttttttgctccagtgttg

SEQ ID NO: 274 - DNA, 4722 bp, Glycine max
  source 1..4722: mol_type = unassigned DNA
tgtctatttctattttttcatatacactatatatatggatttcattttcaataaaagtatttttggcatttgataaaattttgtgagaacttctctctgggttcctcgctgaaccaatctcaggcttatcaaagtaatccttgtggcatctactctgatttatttttcctcactggaagttgcgtcaacccaaaactttgtgaccttatcgggatttacatattaatattataattcctccttggagatgcacaattgaaaagtagtagcaagtaaaggagactttatgaacgccacataagttgagcaaattaaggaattcctcattagtgtagccccaaaagtaaggaaacgagacccgggaaaagattaaaagatttataggcttaatattcatagtcattctctttttttccctttcacatgtacttatttaggcttcatatcttgcaaaaacactttttcttttcttttcttttcccatctttttaccaatgtgactgaagtcataacgtccaactcttgcgcggcatgagaagggtctcaccccatcattgacctaacaagtaatggtcttactcagctacccttgtcaaattcttatttaagatattaattaaggactaaataatatagtagcgtgtgaatactacggaacggaagcaatgatggggatgttgagctggtccttgacattaagatcactcacattatagtttatcaactacacaataagattttttgggttgagagagacaagcatgttgagatgcaatttttctaccttgatcatacttcaagataaagcgttaaaagtaatatatgttggaatataatgattatttttcatattaagaatttgagagggaccaattatggagtgcattaaggcaccttttattcaagtcttgccaaatcacacggggttgagctctcttatttatgaacgtgagaatttagattaaaataatataagataattttatactgtaatttaataacaaaacaactataacttttaaaataataattataaatatcaacaaatttttcatacatgcactatcatgatcatgtttggatctgagtcgaagatacacgtttaaagaaaaatcatgttaaaattctccatatgacacaaaaacatgaattcctaactttagatttacgcacattcatttgttgtcaatagattttcaaacatgatgatagtctacaattagataacagtataaattcgttttaaattgtgaatgcataatttttttctctaataaaattaaatataaattgtaaggtgactattagtaaaattcaagattgttattatcattaataatgacaaatcaatgacttttcaatttctttcatattcctagctaaaagcggttatttttaggattttttatgaataatcaactttattcttacaagatcaaaaatttaaattcagtctctaaatataaaaaagtatgatatgttagttatactaataacttaataacaaattgatttaaattttacaaattaatattaaattaattttcaaaaaatataatttatcatcaaattaatttttaatattataatttaataataaaattatctcacacatttataacagaattaatttatcacatagacgctaaatttatatttgtaatctttcgctgaactaatctatcctagcattacattgtgttggatctggctcgtaagttagctggtctggatcccaaaatttgcaaatcgacataattccgttgctgacagaaagcaaagtgaatgccaaattggcattgatgatttgacacactgtctcaacatttgtttgtattacacataccctttttttcttcaaaaaagagccgacacgtgacactatgaaactcgataaccagataagcaattctaaaccaataaaaatttagggtacaattacatgaatctcatcatacaagtacgctcacttttgaaaagaaaaactttatcatgaaaaaatgtgcattatgaaaagaaggaagaaagagaacatgcacgcaccttaccttatccccatatattgcccttgtacttttaatttgtaaggacgatagaaaacgagtccttgtatctcattggtgtgatagtctctctctctcatcataattttagttgcttgccatcacttcgcatttttgaagtgattgtttggcaccacggaagaacaaaccccacttacctagtgcgccacacatgagtagcacctagcaaaatacacatagaagataagatcttcaactgggtgtaattcaagatgaggtgtcaacaaaaatatagcttagttacattggaattgaaaagcaaagtgatctaaatattaattattaattttatcagatttttattgatatatattaactattagttttattaaattttatttaaaaaatttaaactcaagatctatatatctttttcttttatgtcactgaatcaatcttatattttctaatcctctcacggtcttaaaagaatttcaaagttgaaagattaattttatgtaatgccaaaaaaaaattcgaagtacatgacatcgtcctttgtcctaaacctgaaatgagacccaccatctagcttgccggacactaccagaaaattaacagctaatgcaaacatacaaaacccattggtgcctgtcatgaggttttaacattttccttgattggacccaataatgccagcttcagttaagtataaggtatatttgaaaacaaaaggagcaaagctacaaccccaatagattcatttgttatttcaaattctttttatcaataaatagttggtctcactagaattgaaaaaaaaaaaaatttaagtttgaattttgtaaataaaaaaaatgtttaaaaaaagacttcactgaaaataaactactattaggattttgataaaaattaattatccattgataaaaattaaacgccagtaaaatcggtttatatgctattaacatgcatgcccaaaaattctgtcacacccaaccaaatctcatttggctatcacaatccgttccttttctatgcaggaaaggcataaccgtcaagtaccgcttgtccgtattaagggtcaagtggtcatgtccgccttttcatttcccatatattttctttgttctgcaaaaatattttcatccacacacaataaaaaaaaaaaaaactccctccattcttaatatgtagttttagcatattttttttgttttagaattttggttgcttcacaatttcgatatataattatgcatttttttaataatattcaattttatgtagtgttgtgattatgatgattaattaataattttgaatttcacaatatatttataatggattatatattattagtggcacatttatattgaaaagaaattttattccattaaaggtggcataaaaagatcaaaaagtggattgtcaataatcataaaaaattaaagttataaatcaaataatataaaataatataaaaagttttttttgtcttttgtcagaaattatatatttacctactttaccatcagatgagatattactcattaagttataaactagtttcatttgcgatacataatttaaaaaaaatatcatttcccaacatataaaacaataagcaagaatatttttataaaaattaaatgttttttaatttgtgcatttttttatccataaaaactaaaagtaatattaaaaatttatagcaactcatgaacccttattaattaatatatatccttttgacttcttaatatgtgtatataaataaatattgtttacaaatgaagagagtactatttaatgttataaataccttctaccaactaccgtattattttaataaaaaaaattatttattatttactttcttcttctttttttatcaagagggtggcctaagccacgcgtttacattctttaggaggctcactaaaagtctacaataatgaaaattgaaaaccctaactgaaacaatgtctattgttggcaaatttactgtagggtgcttgttttaaaaacaatttactagataaggtctgttttaaaacaaattgcagagggtcttttatttatgtgggtgccgccattgttactggtgtgaagcttgtaacgtcgctggcaatggcgggagcgtggatgccgccattgacagcagcggaacagggatgccaacgtgcgcagtcccgccattgggtcctgcggcacaccttagaagagttgttggaggacgatgcgagaaggagaatgtggtggatcttgttattgtgctgtgaatggaagatgcacaagagagagttgtagaaggcggagtttgcaaggtgagtgacattttcggatgagagagattatgacgccaaactcggtcactcggttacatcttttgaattaaataacagtattaaaccagatctaaacacctgtctaagtttggacaccaacaacttaattttttgttttccaatacatatttttacaacactgttttgaagaaaaacatcaattacattaataatgtggatttaatttacttaacttattttagtacaatatcggatgagatgtttaaacttcaaaaaaaaaattatataaatatttttttaaacaagtagataaattttgttacttgaaaaagacaaaaaaaaatatttattttaagtaaaaacaagtttgcaaacaatcagaaaat

SEQ ID NO: 275 - DNA, 4100 bp, Glycine max
  source 1..4100: mol_type = unassigned DNA
actatgaaaaatcattttaggactcaaaaatataattccttgtgtttttgtgaatattttgcaggtcacaaagcattttcaagggaaagtcaaaagtggaactaattatctcaacttgccacaacgaatggaatgttcaccacatcgaacgaggatcagaagtgaagcgccaaagtgtgcaaaaccatatttatgtctcgccaaagcaaatcggcaagtctaggacctggatcacgagttacatttgctacaacgatgtgtgtatgctatggtgaaagagtatccaaagacatgaaggttcaaagtgaaaaggatcatttgttgaagaataaggatttactgcaatgaatgctgatgttgtaacaaaataactgaattagttcctctatgaaaagccttgtaacaacaatttgaataatctttggatcatttttcttatttttgttttagggaaaagcttgagggggattctctctctctttctcttctttttatctcatcttttccaatttttatggtagattattgtttaaccatggaatttttcatagattttcattgttgatctgaatgaagtggatctccagcatatatgatttgtttgttgttcaacttttggtttatgcaatcctttctgcttcttttcttaattttcatgcttaggagtgatcaacctagcttttaagaatttgaattgtgtagaaacaagttcagatctcatatatgaagaagtagaatgtgtatgaatctattgctaggaataaagtaggtttatgcattgctgagatttcttgtgttccaatttctaggattagattacctaaggaattagggatttattctagaaattaaggatctcttacctaacaaattaggactagattgctttagttaaatctcagttgcgttgaaattggaagtatgatcagattcgaagttatatatgaagaaatttatggaattcagatccaacaacactttctccaccttgttttcatttttaaactctaaaaaatccaaaatattctaccattcgctgtaacaaattgatgtcccctaaccctaaatgcataatgatattgattagctatttgtcacatgaattgacaactcattgaagtgaaattatatttctatatcaatatccttttaacatctatcaactgctctttgtggacatttcgccactacgaattgacgtcttgctacaacgaaattatcctttgcaacaatatttatttttacttacataacaaaatatttctaatttcttagatattatacataatctttgtggatacaataatttttttatacttaaactaagtacacttgtctatatgttaaggttttgtaatcaaataaaattcaaataaacactaaacacacaaagtcccacacgatcatctgcgtttgagctcggtaaaaggaacatttcttaactattagtctctgtgttactcatgtaaataaaaaataagaaaatcttatttgtaaatatattaaaactggtcagatgaacccagttgttaactcaaattaatttttcttctacctgttatatatttttttattgttatgcgtttattctttttcttcttgtattctattgataattgattgttttaattggtaagtttatcctcaccatgcagatgatggaaactttcaagttgcaataataactatactttttacacaaaaactataaaaatatgattttttttccttaaaaagaatatgttgtgttttttcttctgagtccttaaaattttgttttatagagactaaaaaatatcatattttcaaaaaataaaaacatttaagtttaaatgaaaataaatatagttcaataatttttttatttaatatcttataaatacacatttttttgctggaatcttataaatacatattacaaataagcaatatttttatttaactattaaaaataattaagatattataatagaattttaaattattaatttaccaccaaagaaaattatcccgctaattaaagtaaaatggttgcttcggaattaattaatgtggtaacagaaaagtgaaggttggcaattactactctgtagttgatgcaagtcaacacccccaaatccaattacaccttccaatagggattatcaattgtgcatgttatggacataaagaacattgcatgagattaagaacgatccaacaaatggcataaacctatcatctccatctctgtttttgctgcacgcacatgggttgctccgattcatcccttaagccttaatctctgtcacttctccttttctaacaaagccaaaatccgtctcagcaattcatccttttttttattttcaaactttataaataatttgacataaaaaattacacgaattagtaacgagtttcaactttcaatggcctttgtgtattgtggtgcaatattgaatagaatagccaacctttaccactgacatatggtatattcttaacgagtaaattgcagtaatttctccttagatttattcaaattatatatgtatcttttttttatatattactttggtcttccattctctaaagtcagtaactaacgtgataatttttattttttttgcaatcttcaaaatgtctctccctctattcctaatacaaacctaaccctagtcttaatcttcatccgacgaccaaggtgcaaagggcaacaatggcaaaagacccaatgatgtttcaaatcttaggtaggtttatcccgatctagtgatgttgatggtgaagtcgtgcataaaccccacaacctgttcttgcagcaccccttctttgctttcgtataaatttattttttaaaatcatgtgctaatcacatgatcataaaaacaattgagttaatatcatttgagggggtagggtgcaaccgtaatgggaatggacatattatttttgtaaattaagtgaaaaaaaaaagaaatacgtgtaatgaagacctgagggagtattatcgtaatttgctcattcttaatttattttgtgatcattcaatactcatagtgtaatttaattaaggttgttgcactactacaaaagcgccattcaatgtcagttctcaagggcattctacgtcggtttttgatcgtctttgtctccgacgacgtgaaaaggtgtcaccctatccacgccggttgacaaggaccatcgtagaaatttcttaattctacgtcgtgcacgtggacatgcccgccctagaatgcaacgaagtctacggcagccctggcgatgcgaccgtcctagaaagcataggagtctacgacgggcacctagacaggcccgtcttagaatgtcttgcattctacgacgggcgtggctacgcgactgtcgtagaattcaactgattctaagacgggcacctggacaggcccgtcttagaatgtcttgcattctacgatgggcttggctagacgaccgttgtacaatgcgatcgatactaagacagacctgtccaggtgcctgacttagaatgtctttcattctatgatgggcctcgccagaaccgtcgtagaattgtttttttttttaaatggagcatgcagtgtggagaaacaaacctttgattttgtagtctcaattgaagaagcaatattggcctcaaatgctgctcatccatcaatgaaccactggtctttggcagcatcaaccccattgataagagggtactgttttccttttggatcgaaacaattcacacctaccccctacacctcctccactattagatgtatacacatgtaaattactaacaaaaaattcttaacaagacacataaggtcacattggttgttaatagaaccacatgacttgtgatatgatatgcaaattttgtttaatattcctacaactaattattacgtcttgcattctgtaaaatccttatcaatcacacgttatacttaaatggatcactgaatcatgccacaagttacatgcatgccacttgctacattgataaaatctacaccacatcgaaatctcagttattacccattccaatttccaatttaaatttgtcatagtagtatatgtaaaccttggtcatgaaatgaaaatttgat

SEQ ID NO: 276 - DNA, 5100 bp, Glycine max
  source 1..5100: mol_type = unassigned DNA
gcgggtctcaggacatgatcgtctttgtatggtagtcggggaactcacgtgtccgccacgtgaaacaactaacgatacaaaggcgattgctgtgtgagaccgtcattgtatgttaagcacataattatggctttgccacactgtcagcagtctacgacgggtagtgggaaacatcatcattttgatgctattaattacgaatatgtcaccgccttagtttctacgacggttgtttagaaccgtcgtagattcagcgacggaaaatgcaccttttgtagtagtgttggtagaaaaaaataattaaggttgcaaaaattccaagctctaaacagtaaaagtgaatttaatgtgtaagatttttcgtgcattgtaatcctttttctcacagtgaatttggtgcttcaaattaatataggctttttttaatgattttaatatagacttttgagtggtcaaactatgttaatattactcaaaaaaagaaaacactgtgtcaatagtattttctattttttcactcgtaaaagaaaaaaaattgtttttatatatttatttcttcacaagttcaagaattaaaatattaattcttattttttcaattatattttttgtcttaaatattttacatacttattataaatgacatagaaaatatagtgaaagtcgtattcagaaattaaaaataatttcaatgcaaacaaagatatttattgcatttctgatttttgtaggctgggtagaaagatgaaagaagttttactgaccattgtctttaacaaactaataatactgatttcttgacatgtgcgatacacgcgataaaaggaagatttgagtgtttttatttatttatttaattataaaatgaacataaaatctactaaaaaatatgataattttttttatgattaaatgttcaaatttatatgcttagaagcaaaaatttatgaccacatctaaaattttgtaacatttttagttttttttttcatctgtggatatagtagaatactctcctgatttacaaaaatctatgactataaaaaaaatatcactcaaaatgatgagttctattaccgttgcccatgtaatgcatggatataaatatagacgagtgcgatataaatagaatatataataatttaaaaatatattttttatattgtcaaattataaaaaaatattttgatataaaaacaaatttaaacatcattaatataaaagttatatatattaaatttaaatacaaatatctaagagtttcttgacataaaaatattaatgattataaacaacataatcattccaatggatttgttatagtatgattactagtacatgcaatgcacaaatatataattatattttaggatgattcttagtttttttttgtaatttatgaaacaaatgaaaattttgtatgtagatgttaatgaaaaaggttaatttcatattaatttggagaaaatttacaaagattaaggacatgtattactgaaaaataaatttattaaagtttataaaaaaaaatatataatcatgttcatggatcattcaaatatagactgtcaattaatgttaatagttaatttagtgtaaactgtcaattaatatttcaatttttaatttttacaaataattgaaaattaattttgaattacattttatagaagaattcgtgttgtaaaaaaggtacatcctgaacctaacaaactttgtttttcttcgctctcccttttcaccttacttaattacctagtctctttcaaagcaaattaattaaaatgtataaatcaagtttaatgctgcataaatttcattattcatttcataaaaaaaaatccattattaatgatatcaagttcaccattgtcactctttctgatttctctatataattattaactttaagaaaaatcaattatcataaaaaatattaaaaaatctctattcttacttcaaggaaattcaaatacgtactattaaaaaaatcaattattcaatcaaccaatggctaattaaaaaaaaagaactatatgaaatatttttcaaattttaatttaccactaattcaaaaattgctagaacttttttcattgaaaatataagtaaaataaaaaagaaaaagacataatctttttgtgaaaaaaaaaaaactacaaattgaaattagtaggaaaaaaagagtgtagatcaagggattttgataaacaaaaatgattaaaaattttcaaattgaaaatcaaatgaaattgttatgatgtaataacaaaatacattaaaaaaaataacattgattaatatgaagaaaatgaaacagagagttgacgagataaaaacaatagatgaagaaaaatattataaaatagataaagaagaaaaatacataaaacataagaaaattttaagtataatgttattccaacataaacgtttatgtaatcgttaatattgttctcacgttatcacttataactaaatcaaacaagtaaaaaaaaataaaaattaaaaagactttaagcatgtaaaaagaaacataatttttctcttctttcacaataaaagaacacataagaagaaaaacataaaaagagcaaaaaaaacatgaaaaaaaagaaacacattaaaaaataatatatttttttctcttcgcctacctttttccttctctatatagatcaaaggatcaaaattttctttttacttttttttttcttttttaaagctagtaaagaagaaaaaatgcatctaagaaataagggtagttacttaatttaaaaaataaatgtggttactcgatttctttcaccacctaagaatcttcttcctcaattcaaatatgtatttatacaaaccaagaactaagcttttgtgagataaatagatgcaaattcatgtaaggagaattcatcaatagaaaggagaaaaaaatattacaaaattctccacatgaagaatcctctttctcaactcaaatatgcaattgcacagataagaaaataaaattagtatgctttggtgagattaaaaaaataagatgcagatttagataaagaagattcaaagagaaaggaggtagaagatgttgaaatttacaaagagaaaaaatgataaatgagagaaactaacttgaaatgagtggtgggtaatttataataaaccattccccaattcaaataaaatattcattagttgtagtcaaatgataattaagaatatacttattaattttcttttaatttatttttaaaattcatgattaaatatataaattctagtttgtttatcttgattaagaaacacaattgaaaatataatctaattaaaatccttcattattttccttttatatttctagttaatagttaattgtacataaatggtgattgaaaatatatttattactttccttttaatttgatttgattttaaatttatttaatgttatttcaaattatcttacacggatttaagttaatccaaattttttcttcttccaattatttgtgtatccacgaaatgcttctaattttaacataatatttatttatatttatatttatgaacaaaattatttattgattcaaattaatactttattgttgttctatcatattattagttagttgtacgtaagtgataattgaaaatatatttattactttcctttattaaattctgatatataaaattattaataaatcatgttcaattataaactaaaagttgacgagtttttaatataaaaaataatattatattaagcaaacatcaatcatttttataaaagagaaatgctaacattcctcttttataaaataaatgtagtatttaattattaatttttaatataaataaagattggtctggtttttaaattaattttttgatagaaaaataaaacaaaggtcttcaatttttaaatataaaaaaattgatgattttgtaaaaaaagttacaattaagaattaaaattttgttttaaaaaatgtattttaatataaaattattatttatttaagtataacctggaaatgtaaattacaaaatataaattttacatatcatgtttatttatttatttaatttattatttatttcaatttatatatgatgttttaaataaaaatataataattttatatctaaaattataattataataattatactataaaaactacttctataattatactttttatcctgaaaagaacaggaaaattaaaattattttgtcttaaaattatgagtcaaaaatatttcctttttaggataaaaaattacataatattattcttttatcctttaaaagagcggaaaaattgaagttacatatataccctcatttttactttatattattaaaacttacattgaagacatattaaaaatcgttataaaatgtattaatatagtttttttttctttacttttgagactttaaacagtgccaataaagcaacggttaacatatatgtaaaaaaaaatatttaaattaatattaaatgacttttactatataatatatataaaataaataaaaaattatcagattaaaaaatatttattacaaataaaaaaaaattatcctccgctccctttccttctaaaaccttaaaatacatacctgaatcattagagtgaccaaattgctacccctaacatttgtgaacacgataaacaaattatctgtctgaataatgatttataataattacaagaaaattctgatctaaaatatctttttcccttggccatttattttgtttccattggagcctatggattggcgtacggttagaaattgagatattcctacaaactgccaataattatatataactacatggacaagcaatgtttaagcctcagagataattaattccacaaatctagtgtgccccgagggccaatcattctaagaaagtgtcactctattctatattatattttgtagaataaggcttttttcaaggttggtgaatgggaatcgtggatctgcaataattgggacacatgccatgccccataagtgctacgattactaccaaccaaatatgaattaatctcacatagtagcatataataaagcatttc

SEQ ID NO: 277 - DNA, 3100 bp, Glycine max
  source 1..3100: mol_type = unassigned DNA
cttctggaattcttattcatgtcctttgcaagttagttacagcttttataatggaggacccatgcttaaccatttacggttagctgttattgctaagccctaacaatatgaacaatatgtaactacctttcccgccacgttctacccacagcttgtaccccatttccccagcctttcctaccctagttgataaatgtcccaatgcttgggtaactgctttgtcctagctgagcatctttggtgcgtagcttcatcctcaacgtacgtatcagtaccacaattggttcaaccctaatgaattgagccacactaaaaacgatatatgcacacagaatgttctggtgacatacattccaaaaagcaagacgattaaggatttcaggggactttaatttgagacaatgacatgcatgtaacacaatgctgcacaagtggcattaactagtaagacagagcatgcatattaactaacgtgagattattctaatttagttagaaatctcaagtttaaattttaaatatgtaattattttaaggtcattattttgatgtgttttttttttttaaaattaaacttaatcatattacttgataaaataagtcacatgatattatgtgattcaacaatacataatacataaacgtaatttattttaaagtcacacaaaaataatgatttttatattaaatattcagagaaagagagttgaacttttccaatgtaacaatcatatttgactcatcaaaccggattgactctaataaagaataaatatcgtctatgctaaaaaagagtggcattgactagcaaaacgtgacattccataatggcgtggtttaagaagaaacgcgtggactcattgtttgacaacacgaaagatagttgaaagaaacattcgtaaccttaggttaatccacggttggtgtttatggttttccaatgggcaatgtggcaacgtaggacacataaatgaagaaagcccccctttgtgtgtgtggatgggctatgtgtggtttcaattttgatctgactcgctttcattatgatctggtctaaaaatactttgatgaaaatcttgggaacaaaatttgaaggatattttatccttttgattaacgttgtcaaattgtcgtccaaaaaaagttctgagcaccatgtcagaacatatccttatcaacgaaggagggaaaatccaagaatttcagcatcctttggcgatctatgtttgttctttcattaatttatacttcaatagtgacaaaaattagaagactctagagtagattggtcgaaagagattgatgataccgccaaacaagtttaattcttgcatgtcttttggattgctgctcttctgtaaatgaacttgctatatgacatgcaatgagactgaatatgctaaacatataatgagaataaatatgcatttatattttgtctccaatgaaagtgtttttttctttgtgtgtgtacaaagggggcaaaccgatatcgaaaagacactttcaataccatcgggttagatgccaatggcatattgaggttgctcgtagagatccacccaagtagttttatcctgttgtaaaccgcaagtaattttatcatgttgtagctactcaactaatctcggaagtcaaaaaatttccttgataaaggtttgctcaccaagcaagattttagtggctttaaggagaattggacccgcatccatggagaatgatatttaactcccaatcattgaccacttgtgtcaacttgcatttactctgaaagtgacctctaaaccagctacagtagtttcaaacatatgggcaatttctaattttccggaaaatgaaaggtgctttgataaaaatctgtctcagttactgaattttgcttatcaacttaccattgatttaatcctttcagtggctcttagcaagagtgaaaatgaaaatttatggtaatgtgcttggataaatagaaatgaaggcattaaatggaaatatgaaaaatgaaaaatgtgctaggagttttggactcaaaaaagtgtccagtgtccaataccttgtcaattttcaatcttctacttttcaccttctaattttcgatcactccatcaagctctaaaaagagcaactccacttttcccgtgaatgaaactatgaaagagatgtttgtgagcaaaggggaaagttacaagtttgcactttgatacctacaattttcagttttcattactgtggcactttcaacaagttaataatgtactttcatgcagaattttgttgtcaaaaacatgtcacttccgatattcacacaactattattttactacaggtggtgttgttattgttaaaattatggcgcttttgaataaatgaaaggaccaaccaatttttctgtttgtaagtccgccctattcaaaagtaacattggttcccactaagtagtccacattatatggttctcatatgcccctaagagcaatttgtggatttaatatttggaaaatgtgatgctctttttcctacataagcaccatgaaaattctattaccaatttttttctatgatgggaaaaatcaaaagtttttatttttccatcaatttacattcacctttcattgtaaaagaatatctagaagttaactagtcataaattaaccatatctgaaaaagtggaccctgacccaggaatacaatgcctgaaacctgtggaggaacaaatagattgatcaacctaattgctctagaagttcaatattttaaaaatacatacgcataaatagaaaatctgccaaatctattataacacaaacttcttcctttaatgcataccattttgcaagccattctattttaatcttaaaaagatataagcactaacatcaaaagctatgcttatgtaaaaagttgtgtgtttccttcgaccgcaacatcatcatatgttctttagttctgctagcttagttaaattcaaataaacattatagtccatatggaatctagaagaaacgacaaaccaccattagtgttgtcagaccctaatttcatctaggaaatatcgttcgatatgatattttgattcttgttagtcgaattacgatatttggcg

SEQ ID NO: 278 - DNA, 4000 bp, Glycine max
  source 1..4000: mol_type = unassigned DNA
tggtgctttcttcaaaccatatagagtcgttttcaatctgtagacatggttaggatgttcatagtccaaaaaacctggtggttggtctacatacacttcttcttcaatgcgaccgttgaggaaggcattttttacatccatctgaaaaagtttgaaatccgtgatgcatgcaaatacaaacagcaatcttatagcttctaaccttgcaactggaatgtagatttcatcatagtcaattccttcttcttggttgtatcattttgcaaccaattttgctttattccttactatgaagggtggcattaaaccggttaattagtgctatttagattattataaatatcaataaataaaattataaaatttgcttgaaaaaggtgaagtgttaaacattatatatatatagaggatatatcatatgagagaaaattatcttatatgaaagtgattttaaccatataatcaaacatggatgatcaaaatttaacgagaaccatcaatttcaaccattggatctcaacaaaaaaaattaaaagataatattaaaatctaactattaaaaattcataaattaaaagataatattaaaatctaactattaaaaattcattgtccagttcatcctctccttcccttgctcatcttataatggttgccgacacaccattctaccacatcagatgcatgatgcctctacgttcaaatagggttgtttaattcgaaccgaactgaattgaactgtggcaaattgttcaagcaaattgaactgaactgttttagaggcggttcaaaatgaactaaaccgattgaattgctctccaaactatttcgaatttatctgaattgttctaaaatgcttcaaactattccaaattattccgaattgctccaaactatttttaaggatcatttgtcttgaaaacattcacgagaagaaaatgtttttttattaatttctattttaaatactccaacatataaaaaatatcactttttctggatattaacattttcctctcctaaaaaaataatattaagatttagtttttttttcttcaaatattaacatttagttgatccaacttattgtgtagtttgatgaatgcaaaagtacagtttaggtgcatagttaagcgggaaaaaaaatgaataaaaaaggggtcgaattcaaccattaatggttgtgttactttactaactgataacataaagacataaaaggaataaggaaggggaatcaactgatctataacacggacacaatttgaaagtggacgctgtcacatgatttaaatttttttaagcagttttcattttggttccaattcagttaactgttaatttagagacaattctcattttaattcatagttcaattaattgttaatttaaaaacagttcagatttttgaagttgaactgtacaacaattcagattaatttttattgaaaaaaaaaatcaactattttttatcagttcaattcaattcagcatcggtttagttgaattcaatttttttcccacccctacttacagataatgtggatcaagtgtttgtgttcgaacaagcatcctgatgataaggcgagcaaatattctgcgtattggtttttatatcctttctacctgtgccttttgcaatattgggttttgggaattataattttataaagtcaaaatcaatcataataaagtgttttatatgcgcggtagttgaaaaactgaagcaatttgcttttatctagatcgatacttgtatcaaaatcgaatccaggccaaattaatggaagcatggatcaaaaacaatgaaccatttattcatatcatcgaatgctcactatatatcacatgaactcggaaagggttagatattcccaatacgcggtcactgcattttttcttttaagttaacattcaattgaaaggttggatacgtgatttttccaatgtttggagaaggagaagatagcatatgacctacttaatgaaccgtttaatctcagcggttaattttttaaaattataatctaacgattaaaatcaattatttttattttttattttaaaatttttttcatttgaaatatctcacatatacatatataattattatactataaaatatgatttttatccatccagccattgaattatatctatttattattcaaattatttgtgtcaaattttatcaaaattgaacaacaataaaaagatgatcaaaggatcaatattttgaaaattttatattatgttaattttaatttgtatgaatgagtaacaaataattttatattaatataaatttttttatatataatctatctgaaaggaactttcaatccaattataaattttaacattattcaattgaaaattattgaataatataataatttatcaaagttatacatatgtaatttgactctctctctgcaaaaggtttaatcataatttgtactaaaaaatttaatgttcaatcaaaaagaatgcagaactagaagaaaaaaagtataatttaactccatatcataaaaataaaaagtgggaatttaaaggaaaatacttccaagtttattccttagttctgaatttttttacatattttaaaatcttaaataaggagaatattcgctcccttagactagtgcataacaacattcaagtaatttcattaatcaatcaattcaaacgtacattccctccctgaataacaaaaaatacattccgcttaatgatgaaaattaactcattcaaaggatataatgtttgcaactagagctacttaagaattttacctgccaaagcatatgatgtgaaaatttttaggatatttaaaaatcaaaaagaaaattgttccgttctggagctttcgttatcgttgtgagagaaaggaggttgctacttgcacagaatccaacatccaagttagttcttagcaaagtaacgactagttattgtggaaagaatgtacatgaaaaatggggttgtcagtaaattggagaagaggcttatttaggtgtcttatactcttatacggaagacccataaaaaatatttgagtgatttcaaggattaaatttttgggtaatcaagtgtaggactataaactatataggtgatgagcacaaccaaggttaaaccacttttcgattggtgttctagtggtcggcaatcaactgatcaggctatggaccttcaaaagtatgtttattttatacttgaaaatgttataaataaacgtaaaagtaaagatcttgatttgttaattaaaaaattgtctcaaatttaattttaaaacgaaaccttaaacatattctattccgactaacgtggttagtggataagttgtgcctgaataggattatctagatgaacctccgttctaggacaaacccttgtatatgaccttcaacagtcctatcaatcaatagaaaagttaatccaccggtgaacaacaatgcaaaaacaaaataaattcttagttgaatgaccaacaaatagtattaaatcgacaaaatgcatatatatatatatataaaattcaatcatagatttgcatttgcatgtatagtaaggtttttaatttttgtaataactattttgaaaattatatctaaattgtcggtgtaaatttttgtaccaacaacgtatgaaactaaactaaaaaaactacataattttttcttacagaatccttcaattttgttaaaacattactgggtaaatagtttattagcgcaacttcaattgatattatatatctacagtgatagactataatctcattccctgtttgacattccacatgacaaataacttgcagaactacggccaagtttgtgctattattattgtttttataaattaaaaatcaacgtttactttttaaaacattgaaaaaagtgtataataattagcttattcgaaagaaaaaaatctcaagaaacgattttataactataaaataaactagattatttaacttcaaaacataatc

SEQ ID NO: 279 - DNA, 4314 bp, Glycine max
  source 1..4314: mol_type = unassigned DNA
acattaaaatgagacgcgacttacatttttacatttatttttaatttaaaatctttatttttatttatttttatttcattttaaaaaacatacactaattaaggataaaatataagtataattatattttattaatttacatgataaagatacaaataacttatcaaaagagaattctaattctgatttaaaaatagcacttcctttcccttctcataaaaaataacggtaaatatatttaaaatttttataaaatttgaaaaatattaatttaatattcattaaaaaaagttattaatttggtcctataaaaatataacataactttgttgaccctttcactagatgataatctgatgtgattaatggacttatattaattacaaatgaattaaataatttgtgactgttaaaatcttctcaaataaattaaaaaaaaaattatcagcttataacttttcaaaaatataatttttttctctttttagacgatattctcacacgggtgaaattaggaaaaaaaaggaagtaatagtgagttctcaactttttatatcttttaaatgtgcttaaaaaagttaaaagagaaataatcaagtttatcagtgacctctaacaatcatctaacgaatttactattaacaaccaataaaaatatattttattttccgaaagaccaaatcaatacaaaaaaaaattatgagaataaaattaatacttttaaaatttttacaggtatccaaaatatattttacccaaaaataacacttccttcgttctataataaatataatataaaaagtatataatatgtctcaaaataagtggcataatatttctttaaatgttattgtagtgttgcatggtttcttactaggaaaataaataataaggttatctttatgatatttttgtattttattgcttatttattaaattttttatctgtataaaacgatctaacacaatactaattatgtgacgaaatgagttcaaagttaaaatcttaaaatatgtatttttaaacttcaactagtaatcttaaaagtattagtttccacttatttgatttaatcataataaaattgttatgaaattataaaataaaaaggattaaataaggacaacaaaatagttaagaaattataaaataaaattgttatgatttaatcataatttacactaaatgattaaaggatcttgctaactcaatttgaagttactagttaagaaatttaaaatattttttatttattgaaattcaccttagaaatgaattgaaagacacaaaagaagtacattaatgacatttttaatgaattttttattttaattttcttaattaatatcctaagagtaattattaagatctggcaggattaaataaggacaatccataccttaagtgatctataaactctttattttttttaaaaaatgtttaaaattaaaaataaaataaaaggttttgacattagttcttttgagattgtgaggagttttttttttttttacttggtcaagttttaagttactttttaatataaaaaaatgacatacaaatatcccaataacaagagttattctaactaggttgacgctacaaagtctgatcatgatatgcggtacgccaaagagatataattaacaaaaagcaaaaaggagatatgcaaaaaataccgtgggatgtaaactgaacccatgatgagcacaacaaaatagctatttaaatctatagttttggagacttatatatttctagacggatcctatcgtgtacaagtgaatcaagtgcggcatgaaccacaaattttttaagagccatgagatatgatgtcaaaaaatgatgtaccagatgcaataacttaccatggtccatggggatgtggtatcttatcatttaagtgtttatctggttttatttttagcacttgacccgtgaatttagaaataaaaaagaaaatacatttttacgtgattttaagtaaattgttcattttatgtataatttacttgtttttattaaaaaaatatctatgtgctatattttatttttaatatattgacatataaatattaatgtaagaaaattaaaatttgttcaaataaaaaaaatcttgaataatttcttaaagtgagaaaataattaataaaaaataattctggacactaattttgtttgaaaaataatagtgactaacttaatttaattttttttattatcatgatattagttaggaatatccagtttagtgcataattaatcttggagaattgactaatcatatttagtataatattactttttaaccatattttttatccctaaaattcaaactcgagaccttgtttaagtttatttaatttaatttttgttatgtgattaaattaatattgattatgtaaaagaaatttataattttgattggtaaataatttttagtaaaaaagtttatttccgtgaattaagtgtaatttttcctacttatttttataaaatatatttatgacatgtgttatattttacatattttatcaattaatttggtcttcttattttttaaaggttcaatttaatcccttaatttatttattaggttcaatttggtttctttatttttaaaatgtttaattagatcctttattttttaaaatgggttcaatttgaaggttttttttttttttcatcttcggacattttcaaaaaataaagaacataattaaaagatttaaaaataaaagatcaaattaaactcaataaataaattaagtgatcaaattaacattttaagaatggcttaattacccaataggttcctttgtttatttaaaatacttaattgagccctcttatttttcaattagatcctttattttcaaaattgacataattgaattatttctatccaattaagttggcgttcgttagatgatgagtattaactgttatcaattatgaatagtaacatataattgcctttattcataattgataaccacaatttatcccataacacacttaacttaattggacaaaaatgactcaattgtatcaattttaaaaacaaataacctaattgcatagtaaaaaaaaaacaagagggcccaattacatattttaaataaaggatctagtattagataattgagtcttttaagaataaaaagatcaaattaaacttaaaatataaattaaaagatccaaataataattaaatcataaatatatttatcatttgttgtatttttttcatactttctatgttcatagcataaatcattcaataaattatttaagttagcaaagagaaaaccataaaaaatacatttaaatttaaattattttactataaataaaaaattataatttcatcatattaaattaaatatattttaaagataattttattaaataagataaaattagttaagatttttttataaccgagaaaaaaataagaaatttatgttgtttatatttgaattcagagacagtaataggaatgaatatttattttaataaaagcaagtaacttttttatagttattttacatagataaacaattaacttaaaatcatatcgaaaatgtatttcctcttttatttctaaatccacatgtcaactgttaaaagcaaaactaacataaacactgaaacaagtcttttcgtgataagttattgcatctagtacatccattttttgggcatcctgttgcatggtcttaaaaaacttgtgcatcgtgtcacttgtgcacggtagaatcgtcatatttctattaaattctcaggagacaaaagagggaacagaaccattgaaagaagaggcataaaagacaaaaatatttgcataagtattgtcttctaaaaaaatatgcccaactaaaaactgtattttcttagttatttgattgcagttaatccaaaaaaaattggaagggccaaaatactcacagtcataatgtataaattaaaaataaagaatatatttttagttcctacaattattgaaatattggttttgattagtataagaaatttattggtgttaagtccctacattaacctaaaatagtgtgattaagctcttattattaaggattgaaacataattttttttataaaaaagtaagtatttaaaatgtacaaactttttacggggactaaaaatatttatttttttacaaggactgaaatcaatactttaacatattttgagggacaaaatatatattttactctaagttaaaggtaacaattttgataatatatcctttatcaatgattttaagcattgaatgatattcaaatttcaa

SEQ ID NO: 280 - DNA, 5000 bp, Glycine max
  source 1..5000: mol_type = unassigned DNA
ctaactaaccaaataatattttcatactaactaatctaaccttggagtatctattaatacataaaaattaagaacaaaatacctattaatactaactaacctaaacttagaatacctattaatattaacagaatatataaatcttatttactaaaatcacttaccaggaattatggactacaaaggccacacacgaaacttcaaggaagcacacgaaccacacactgaaggagaaaaggagctcaacaactacaacttggagaagtgtagttaaattactatgatggagtctttttttataggagaaaacgtaaaggaagcaatgctaaccctctgcattttcacgttcaaaaacactgcattttcacgttcaccctagccctgaagacactgcaagccctagcctgaaaacactgcaaccctactcactgcaaaagcactgtgcatgctaaagcttgggagaggcgagacggtgactccacgtcagactcgctatcaccaatggcggtactatcttcacgtgagcttctcgccagtgggagcaacgagacagcttccacgtcagctgtctcgccattgacaatggcggcaccctccacgtcaccaagtttctcgccattgacaatggcggctagcgtttctcgccactactgctggcgacatccatggtaaaacagaccctgcttgtaaatactttgaaaaaagactctctttagtaattagtttataaatggacccctctgtggtaaatttgtccaaataatatcaattcactagcaactggttcatttgactatattaacatatctcgacctttagataaagtaaaatagcaaataactaagtattttgtcataacttagttgaatacaaaacatcttccttggctagtttgaaagcgcgactactttcgtaagatgcgaggttcagggcagcatgtggttctacctgcacaatagcacattatattgtcatatgtcttaagcttgtcaaatgttcataattcatgaaattagaaacgctttaaggatcttgaaataacaaacttcagaacctgttgttacaattagcatatcctttcgagcataagcatcaatatcttctactttcaccttattagaaataagaaaattcagggcaagagaaatgagactcacaaaagctgttataaatattaggttaaagatgaatagttttcacataaaattagaaacacaaagggcacatgaataaaaaagtaaactagcagtaattgtccaaatagcatgaaaatgaattagattcatacagtcaagcaaacagttattagctcagaggttattaaagtagcgaataaatatttcattgaaattctaacaaagaataaaaatgcaaagattgatatatgtcaaaaaatcacttggccataaagctcaagctagtaaagtaaaacaaggcccaggaataatactcttcataattttaacaccatatagcatgaaagtttactagtcctgaaagcaggtacttaaacttaaaagtccaaagtggatatactggaagatgagttttgaattcattgataaaggaaggagggccaagtacctaaccatagtagatattccaaatttaaaaagtctattagcaaagaaatacaaataaaaatttgaaaaagtggaaacatgttatccttggagtagttctaccagcactggccatgaaaaggcatattaagctcaatgggagctgctatctaggaaccactcagagaacaccacaaaccttaatagttagtatacattgacctctagggaactgctaattactaccatattaaaccctcttggtcttcaaaccgttaatgttaaattcaaggaataagatcaagataaatgatttaaaaccaagaacgagtagcaaatatcccggtgacttacaatgctactccttctttagagagttcctttaaagcttcatgatcaaaaacactaataactaagtattttttcataccttagctgaataattaaggtaactttgagtctttgactgtttttaaggttgattaagaagaaatgaatagattattatccgaagaaattctcaagaaaatacaatattgaaatacacattattattattattatttgttttacacatgccattattatacaaaaaagcaggacttatatgggaagtctagagttatactaacttgagagaccacttcaaattatgtatttcatccttaatgaggtcccgctcactcctcaaaaattaaagttcctgcacagggctattcatgtaaaaatctcccttgatgcaagttatcatgtcagaagtatgcaaaagaaaacctcatttaaaatgtgagaagtccacataaaaatactttataccagacttaagctgataattttctctatttttatctttaatgaagtaaagccttattataaaaaaaactaatcatagaaaaaaaaaacaataagcaccttgcgggtatccctagattcccagaggagtttaacccccttgtcaagctcttagattacaagcattgttctccatcctgccattgagcgcatcgcatcaaaatcaaacttaatttaaagcaacatctagaaatataagtgaatttcaaatggactagtaacaactggtttctaaacataaacaagtattccattaacttgttaaagattccatcaatgtctattttatcaattacgtttccagttattatttcccctcctacaatcataactacattttatcaccaaaatttataggtagattgaacacaaatgcaaaatccatttatcagaatagttaaaaggattaataccaataacctttttttgctgcatcatatatatgcataaatgtgatccccaacatagagaatctgcatataaagcatccaaattcttacaggaagcttcagtttagtgacaatcttcaagtgtacatgaatcctaaataacatctacttaaaagtaataaactctttaaaccagaaaatcccatgacacaaccaagcagccgtttgtgggagatgaggtttgtctcgttgatatggtccttgcggccatttgcacatgaataaataaaaccacagcgctgcgaacccttcacaaacggcggcaacagagtgatttgcggtgccaattttggggtgttagggtggagctgtgccttttggtgtgggagggtggcggtagggtgggtgttaggaattttcaataaatcttataaaatatcaaatgagcaccataacacattacattacgttagatcatcaagagagaggtttcaaggaatacctggatccatagagtttgattaacacgcagtgaaatcttacaacggtcacaaacaattggtttaatgaccttcctaaaccaaatcaccttattccttatgggaccttcgttttctcttcagacggggagagaagaaattgtttattgatttggtgtattgggaaccataaccatgtcttatgttttaaacctattagagttctcattatccccgtccatatcaatttttttgacagtctaatagactcacttaaatagatcactttatattgaatccatttaaatgtaaataactaatataaatgttataatataatatgtagttcatattaattaattaggaattataaaatttctaacaatcactttttttttaaacggatctcatataatgatttaaaaagcggttgtaaattgtgttttcattaaaaggtatgataattaatatatttctaacatcaaggacagttcaacttgaaatgctgatctttcaatgtatcagaaaaaatgtatagcagcatctgcaattttgcataacgttgccaatgactagaaattgacctctttcaaaagattgaaatttccaaagtgaagcctataccaacaaagtatttcagattgctgctagaaatttcactccaatcagcatgtttaaaggaccaccgtgatgaactttgttggttccacttttatacaggattcaagagtaacaaaaaccttaaggaagcatattagatggcactattttaaccatcagtattacaatgacaatgtaggccaaaatacaatatgaaaaaagagagaaaaggaactatatattgcttaataattatgattcatgccacacctaagaattgctagcagttacataactctctcgtctcccaaattccttcgcagggtcgagggcgctgggataagcaaactttttaagatcatcttcactttgcatggaattcattgtgatagacaaggccagagccacttactcaacggtttttacaatcaccatttttcacgtagctttttaggatcatttgattcacatagctgctccaattctctcaccacctcatccatatttcacctgtatttggactctacaacaagacattgaaaagttagggtgactgctctttgagcttggttaagggaatactgttcttcaatacgactatccattacgtgaaaagctttgtgttagaaagagctactccaaaactataaacatcactcttggtagtgaggtgacctagtaaaaatggaaaaagaatcagttactcataaaaaattgctatggacaacctccttgtttgtatattatattctagaaactaagtgtcgcttcaatcaaattgttctacttttgtgctgaaagtgttggctccatttttttttacctttctttcattttttatctgttcttcattcttttttcttcttttatctttcatttactttctattttattttatcaagaaaatcaaactatcgttaattctccattcatttttgtttctccagtacgtcattcgtttcaaattcattcttgctgtttgtattcattttgtttctttgctccacctgttagtctcctaccttatttctccattttatgatttgctctagtattaattgtacctaaaattagtcccattagcccaaatggtcaaaatcttactcaaacttgcaaat

SEQ ID NO: 281 - DNA, 3430 bp, Glycine max
  source 1..3430: mol_type = unassigned DNA
ttattttagaatgtaatgaggaatacaatacgccaaaaagatgtctactcacagacgagacagggtataatatacaaaatacaacttttgaaacttaaaagagtaagggtgttctcagttcacgtaactcatgaacctgaaccaactaaagcaatatttaagttttaagcagtcactttagtccctgaaaataaaatgtaaccagatgataaaactcattaattcttttattgggtgatcaagcctactctgttcttaccctctttcatattaaaacaccaacaccttttccaatcaatcggatacctcttcttcctcttgtgcagcccctactcgttcctctcctcttagagaagcccttcctctcataaacaacataaaatagaagaaaaatgaatcctcaaacggtgttgaagaagttgaagaggaaggacaaaacaaaagggacatacaacaaaaacattgtattattattaattaatagtattaatatgttaatataaaaccataaacatgtggttcaaaataagaacacgcggcacctttacatcccagatgactaagggttttgttggcagatgttgaagctgcaagcaagctgcccctcgtccgtgtgttgctatcgataaaggcaaaataaaagcccctacctaccagcaaaacaaaaaccttgtcttcgcaatgccattcattacacattttcaagcaagcaacactagggcatgggtacttactagttcgtacaatacgaccgcggcacggcacaccttgaacagggcttagtgatgggtcacagagttttcttcgacaaggcttagtgatgatgggtcacaaagttctccttcaacacttggtgaagaccaaaggggatgctggagttgtctttgaacacgacattagacgctgggtcaacagtggaaagggatggatgtaaaggaataatccctaatttgagggaaataaaacaaaggcggctttggtccaaacccgtcgttgaattttttttcttatatttacaaaaatgccacccaacaacttcctaagacggttatttataaccgccttagaatttacgtagtaaaaaattattctcagcttttataattacaaatttgtcactgcgccactatctaaggcggttctggataaccgacttagatagtacgtcgtaaaaaagcattattctagtagtgatatcaatgtccaaatttcatatgttaaatttaatgatattttagcattgaaggaaaatgttatgtgatgatgttctctataaactgtagatatactatttttttattttgttgccttggtcctatatgtacactatttatgactattaaatataggattaggtaaacataaagagtacgtggttagaaatatatattactttaattaatattaaattttgtaatattaatttatacaaatgtctttatgatgaatatattcttttgtgcatgtagggaagtttggttggaagagttcactcgaatcacgcacgcttccgttaatcaagcaagggtatgttatacttgatttattgttaaacaaatctttcttggcttaaatatctaatgtgttagatgagttataccagaagatgattttatttatacttcttttaatttgagcaacctgcatggtaacaattatgagaattgactacaaatttgtcgaatttttccctcttttttccttgtcaaataggccgataggaaacccgcatcacctgtcacgtacgtggatctataatcaaatacaaaattttcttatttgtccttcattttgattacaaaaataaacatttgacaaattctaatggaaaaataaaaatgaaaaaaatatcatataaaaatagagaaattatttaaaaccttttaattaattttaaaatatgtttaatattctttaatactagttaaccagaccctttgatggaatcataaaatagaattttctcaacaaaaatccaaacgtacacatataattgtttaaactcataatttattgtgagaaaattaaattttctaaataaatgcaatatgcgaaattcaagagcatggttctgaattgaggtcgtggttgtgattgcggttgtggatgtagattgcaattgttgcgacgtaaaattattatatgtttggattgaatatgaaaaatgaattttataattattctaattattggtgtatcttttatctataagataacataacttttcattaattttaagatttagtatcccacatcccaatagttcatacccattcaaccattgatacttagaagttcaaatagaagattaaagtttgaatcattattttttttgacaaaaaaggtggaatagaacaatgtaaaggttctgttgagacttcaatgtgattcattgcagctatgttgcggcatttcgcgtgattgaaattcaaactacaattataggttgatgtggttccaggcaccaattcaacaataatattgcggctgcagttgtggttgcaagccgtaatttagaaccttggtcaagagatacactccaagtggaatgtatgttgactaatagagaactctagtaccataatgagaggataggtgaagaaatgagatgattaaggtttactaaatctcattcatgaatgaagtcattcacctttgctaaataaaagggtcttctgaaaaagatgaaccatcctaactaatgcaagaatagaaagccacttgggtgagagagtatattgtagtgagaatacattatcattttttgtaatagtgttgggtaattaatacttttacaaacaaaattacccacacctacaaagtatcatcaaaacacaataaatattagaccgtaggaaaaataataacaaatataagaatttaacgtgattcggcacctcttgccttcattcacggaaccatctcaaaaatatttccctattataaaatgattacaagattgtaacttaacctcaaatagtgtatcactctacaaacctgagtaccccactcaatggttgcaagaaatgataacactctcacacaagacatttttctctcaacaaagtgattttattttgtaatctctgttctcacatgctctctcttcgtgtgtttcctctatgctaattcttttctttatttatagtgaagattgttaccaactataataaataaattcttttggaagttgaaataaaaataactttcaatgcatccttcaaataaggttcatctagtaaaatgcaatcttccactttatatttaaaccacctaaaccttagtggtaaaagtttaattccccatatgcattaaatgcatcttatcttttgacttaaaagtctacaatatattatgacatgctagttgttggtttatctagatacacaagaataaggttatattccaaaatttgtttccaaatatttct

SEQ ID NO: 282 - DNA, 2990 bp, Glycine max
  source 1..2990: mol_type = unassigned DNA
taacactctcacacaagacatttttctctcaacaaagtgattttattttgtaatctctgttctcacatgctctctcttcgtgtgtttcctctatgctaattcttttctttatttatagtgaagattgttaccaactataataaataaattcttttggaagttgaaataaaaataactttcaatgcatccttcaaataaggttcatctagtaaaatgcaatcttccactttatatttaaaccacctaaaccttagtggtaaaagtttaattccccatatgcattaaatgcatcttatcttttgacttaaaagtctacaatatattatgacatgctagttgttggtttatctagatacacaagaataaggttatattccaaaatttgtttccaaatatttcttcagttctgctgcatacacaaggtatctcgtggacctggtttatatataagactccttttaccagtggcgtaacttttgccaattggtgtagtcctgtggactgtttgcatatggtctattagaaaatttattagcttttcttccgccttcatttatactttgccaataaaaacatagaatctttactctttattttagaatttaattataatgcattggtatctacatatattatataaatgttcataaaatgttttttaatcactgtccatcaaaattaaactcatatttttttgagttaccagtataacggataaaataacttttttccatgggaattgttaggtgcatcttgtacaatttctcgtgcatccagtcttttaagtgaagtgacaacattatccttcacttaaaattttaaaaatttctccctctccctatgttgtgctatatattgtgcttccctcttcttcattctttgcttcttctcacctcgccgccgcagtttgtgcctctgtttgcgcattcctgtcaattcctacactgttgtcgcgttcaccttcaccgtaagtccctcttttccactccttgattgaaaatgagattacatagccattatacgcataatccgtataatccatacgaattatcaatccgtatacattacatggattctcaatccacataattacttttttatttattaattaataaataaataattgaataaactattattacttaaaataaattaatatttttgttgttataatatttagttaataaattcatattgttgtatatttttaatatgtattatttaattagtcatatttcttttttgaagttggtttttaatgattaattaattcgataaataattaatttatgaattttttatttaaaaatgaatgtataaatattattgttatttatttatttttaaaatataagtaatttaattatatttgatatttaaaatagtttttttataaatttgttaaatataaaaaattccaattttttataagtatatattgtacaatttagtttaacaagaaaatctaatattttatatgacaaactttttttattcatatagttgtataaatattagtacactaataatgtttgggattataaaattaaaatttcttcatttgtttataaatatttaaaagtactcaaatactgatttgtaaaaaaataaatagttatttattagaaataaaaaataagtttgtatttagattttcatcatatattttagtttactagaattagtaatgtgttgtttataaattttaaaaaagaatttctatattgatttatgaatatataaaagtattaaaaagttatttaaaaaataataataaaatatttctttatgaattattaaatagtaatttattaaatattttaaatcaaatttatttattagtcaatttcttagttagtttatgaaactcaactattatttgaatgatgacattaattaattgttatgactgtttaaatttgtagattatggcttgaaccagaggattgtgtcgtgctttaggcggagttgtaggaagagccttaaggacacaagttagtggtgatgtggaagaagcctctcagcgttgaaggctgatagcatctgcacataggcaaagagcaactgtagctattcctgaggatgttgagcatgtggataatctagctgacgaggttcataagcaacctcaggagccagttactgatgatgtacttgctaatgcccagggttttccaggcaggccccataatacatcagttttgatatattatgtatatcatgtggcagccatagtttgggtaagagaggtacttattacttgaattatataatatttgaataactatttttcatttaacctgaagtaattacattttttcttaggagtgtcctaagttgaagttgtcctctcatgggagaaaggtgcaaaatttttgaaggcctacaccaaagattgaaggtataatagctgccacaggattaagtttttttattgcatgttccttggacactagtgacagggaacttatatctggttttgcaaagagatggcacaaagaaactagtagtttccatcttccggtaggaaaggtcactatcaccctcgatgatgtggccttcttgctacatctgcccattataggcgtcttccataactttgatgctcctgacgcagaacatgttgtggagctgctagttgagttgctcgaagtgaatacagaaaatgaaagagatgagacattccaaaccagatggacatatgttcagctagcctaactgtgagacatttatcgtagcaaatgtgacataggacagtggaccgtagcaactcgagaatattttttgcatctagttggttgcacactgtttgctaacaagggtgcgacacacatgcatgtggtattcttggacgcatttcgtgacttcagccaatttggaagctattcatggggagctgctgcattggtccatatgtatgataatttgaatgatgcatcaaagaaatccactaggcaacttgcaggatatatcacattgttacaggtatt

SEQ ID NO: 283 - DNA, 21 bp, Glycine max
  source 1..21: mol_type = unassigned DNA
tgcaagcatcttctgtggcat

SEQ ID NO: 284 - DNA, 21 bp, Glycine max
  source 1..21: mol_type = unassigned DNA
ggaacgtttctacgcttcgta

SEQ ID NO: 285 - DNA, 21 bp, Glycine max
  source 1..21: mol_type = unassigned DNA
acagcatgagaagtacctcgt

SEQ ID NO: 286 - DNA, 21 bp, Glycine max
  source 1..21: mol_type = unassigned DNA
acttacacgtggcagtttcaa

SEQ ID NO: 287 - DNA, 21 bp, Glycine max
  source 1..21: mol_type = unassigned DNA
atcacaccgtgaatgcattca

SEQ ID NO: 288 - DNA, 22 bp, Glycine max
  source 1..22: mol_type = unassigned DNA
aggatgatccagaatgctagct

SEQ ID NO: 289 - DNA, 21 bp, Glycine max
  source 1..21: mol_type = unassigned DNA
tctcctgtgccacaacatcct

SEQ ID NO: 290 - DNA, 21 bp, Glycine max
  source 1..21: mol_type = unassigned DNA
acaacaccgcgtcacaatcat

SEQ ID NO: 291 - DNA, 21 bp, Glycine max
  source 1..21: mol_type = unassigned DNA
agtgcacctagcaacactcca

SEQ ID NO: 292 - DNA, 21 bp, Glycine max
  source 1..21: mol_type = unassigned DNA
aatgcgaagtgatggcaagca

SEQ ID NO: 293 - DNA, 990 bp, Zea mays
  source 1..990: mol_type = unassigned DNA
catcagaccataggacgacagtcaggcgggtgtcacgggtggcgaatccactactcaccacattggtgccctcggacccctgctcgacagactcgaagagaaagctgggcgcatcgcgttcgtcctccttaacgagacagcggtacgctagcacgggcgtgaggtgatcggagaagatgcacctcgtgagcggcagcaggttgcggccctccgccgccgccgtccggaacctggactcctcctccctcaccgctgcgcgcgcgcacacgagaaacgagaccgtacctcgacggcattaatagttaaccaaaactgcagcacgcccggtcccaatccggcggaacagacacggcctcggatcgaggcacaggcactcaccgacggcgtcgagctggtggaacgtggcggtggtggcgcggcaggtgacgccggcggccccccggcggcggaggctcagcgggcgcgaggacggcgcgaggcgcagcgagagcgcgaggctggcggtggccatggactgcggcctgcgggcgggatgacacgaacacgagtgcgcggtgaggagggttgttgagggggacgagcgggaatggatatagataggggcggggcggggcggggcgcgagggaggagcacgcgggcggcgggcgcgggcgagtggagtggagtggagtggagtcggggagggcgaggcgcgacacgtcgcggccaggcctggcattcaggcgtgggccccctcgtgctccgccaaagaatgctgtgttgtgctgctctgcccacgaggtttgaaactgctcgcatcgcatgcttgtgccaaggtctacagctatatgttgtcacatccttctctgccatataatgacatctttggcatgacgagcagcaaacggcgtgtgtttcgcgagaaagaagacgatcgatcacgtgtgcaagtgcgccacgctagacaacagaaacggttcggcatgcacacgtgagctggcacgaacgta

SEQ ID NO: 294 - DNA, 530 bp, Zea mays
  source 1..530: mol_type = unassigned DNA
gcatatcaactttatgatggagactgtttatctttcatgagctttttagagaatttccacaattcacagatcacgaccaacgtcaacccataccctgcaggacgatatctcatatataagccccaaacacattaagacaaaaaacattctaccttacagaccatagagtattacatcttcactagatagtgtaacataatgtgtactcttgttacatatacaagttttttctagagtcccaacacgttggatctcctatcataacgtttggtttgctaccgtgcgtaatccaggtgggtctcaaactcatctccttaatgcattatctatcatgtttcaagataaacctttcgtaaatggatctgctggatttttagccatgtttacataattaggaactgtcaatccagaggtcatgcaacatcgatgagtctactgagattgattatttctcgtatattttggggagaatgtcatcttattatatctaggagtatgctctcgtgattactgaaatgttttggtggtta

SEQ ID NO: 295 - DNA, 19 bp, Zea mays
  source 1..19: mol_type = unassigned DNA
tactgatccatgtcagcta

SEQ ID NO: 296 - DNA, 19 bp, Zea mays
  source 1..19: mol_type = unassigned DNA
tagcgtgttatcccgtcct

SEQ ID NO: 297 - DNA, 19 bp, Zea mays
  source 1..19: mol_type = unassigned DNA
tgcgcctgcacgagctggc

SEQ ID NO: 298 - DNA, 19 bp, Zea mays
  source 1..19: mol_type = unassigned DNA
tggcttctcctgtcgtcat

SEQ ID NO: 299 - DNA, 2001 bp, Zea mays
  source 1..2001: mol_type = unassigned DNA
catgccgatgttagaggtggaagcatcaaagggcgcgcgacatcgagagctctctcgagattggttgtttcttgtaattttagagaaaatgaactttctattatataggggggacaacctttgtgattacccattacctttcattataggactaaacttcccatgatttattgactcatacacgaatggatatttgagatttattctatgaattacttggaggaatgtgggggccaaagaccagataatttcaacaatcctccaccaaatctcgaaagcaacacttaatcggctctcaagaagtcctcaagtaccgtttggcatatcaactttatgatggagactgtttatctttcatgagctttttagagaatttccacaattcacagatcacgaccaacgtcaacccataccctgcaggacgatatctcatatataagccccaaacacattaagacaaaaaacattctaccttacagaccatagagtattacatcttcactagatagtgtaacataatgtgtactcttgttacatatacaagttttttctagagtcccaacacgttggatctcctatcataacgtttggtttgctaccgtgcgtaatccaggtgggtctcaaactcatctccttaatgcattatctatcatgtttcaagataaacctttcgtaaatggatctgctggatttttagccatgtttacataattaggaactgtcaatccagaggtcatgcaacatcgatgagtctactgagattgattatttctcgtatattttggggagaatgtcatcttattatatctaggagtatgctctcgtgattactgaaatgttttggtggttagatgctcaacacatattgttttggttgatataagctaagtgtcaagagatgcaaatggaaaaaagcaaggtatgactctagctttagtaaattgtttttggtactaacattattctactaagtgcaaagaaccttgtcaaatcgagaaaatcggattggagaagtttggctaagtccagccaaacttgcaccagctcgcggtgcaccagactgtgtctggtgcccaggctggcgctccggtgaactagccgatctcgggaaaatctgagggcgtcgcggctataattcactggactgtccggtgagccagccgcgcccacgccaacggtcggccgcgcgatcagcgggcgacacgtgggcttcgccaacggtcaccaggtcgcaccagactgtccggtatgccacgggggtcggtggctgcaacagtcaacttcgtcagaaaaggaaggaaatcacgcactattcactgtccggtgcgcccatagacaccaggcaactaaagctttccaaatagagttcaaacggatcctagctaccttggggctataaaagggactcataggcgcatggagcagtacaccaagcacccattgaacattctaagacgccaagacttcgcatacacgtatttggttcatcatgatagtgaatcgagcacttctttgagttgtgactatgatgtgatgcttttgtgtgctcgttcttgtcttgtgtgcgtgttgttgctacactctcgctcttgtgtgttttgctattccccccttactcttgtgctcattcgagatcatttgtgtaaggtgtgagagactccgaagtgtggagattcctcacaacggtatattattgagataaatagaatcatggtattcaagttgatttttggatcacttgagaggggttgagtgcaaccctcgtccattgggacgccacaacgtggagtagccaactattctacttaatcgaaccacgggataaaatcgttgtgtcaaatgtctttctgagcaagtagatccaacgggagagtgcagagagtgtttgcaaagttccacggggaatgacaatagctctgttaatctggcctctcaagggcactgtacggtggtatttataggcacccgagtgaccaccgtcctctggtaagaacgtttatg

SEQ ID NO: 300 - DNA, 2640 bp, Zea mays
  source 1..2640: mol_type = unassigned DNA
gtttataatcccaaattcctataaatccaagacagatgtttttgccaaccaagccaaatttacaacacagtaacacattttggtggacaaaattggaatattcataccatggcagcaataaaaacagatcagggaactccattttcaacagaaagaaagcaaagaagaaaatttcgagaaaacaagtttactcagtgtatgcacctcatcattgaaaatgattgccgttggtcataagccaatagtatagattgcatcaagaataggaacaaaactaataaaccaaaggaaaaataccatcaattggttcttcagctattattatatctgtgtcaatattcgcatggatgacatggccatccgtgctacgccgcacagttccttttatgcccatcaagcaatgctcctgcacatggaaagggtagatacttcgcatgagaaccagagaaaaacagaagaagaaaaagacatgtaggcatggcagaaaatgatacatcacatactaatcaagtacaacactacctttgagtgctgcaacaatgtatgtgagtcatgccgcagacttggagctgcatttttcttgttcgttttcacccagcaaacatcttcacacctacggaatccccactgatcatagaaaaatttcagtcagcctcatctacttgttattgcagctcatcaacaactgaaaattaaaacacacatacatgaaataaaactgtggaagtatgaaacaatgtttatgttgctacgacattccatcagagggcaaaaattgatttgaagctgcgggaacctgggtgacctcctaaaaaatgatttcaagatcccaccccatcccccaaaacgaatggcattacaataataatatagagcgcagtcatttaagtacggaaatagcaggctctaccttctttaaacactgacgaccctgttcaaggcctacaccatcaccaacccaaaggaacacaaaggagggtgtatctgcaatagcctgttgattcaaaaaatacacttctaaatattaattctgcagcataaatgaaatcacaaaatagaaaggataaagaaaaggggaaaacctcaatcttcaaattcataatctcctcagcagtccaatattctatgtgatctgtgattcctggcgcacggtgagtatactcctcccatggaggatccacaagaataacatcgaacttggtaccaaaaaactctggagaaagaacatgttcccgcaggtcacacttgtaatacattggcggtgaagctgacttagcaacaatttcatctttcctctgtatgagttctctcaactttggatagtcctctgctacgcttgtaagatccagttctctaatgaaattttgaggcctcatgccagtgtccacaaagttctgtgagtaatcattttgttcgccccttgaaggagcttttctgtttggtccactgttcctatgtggcatccaaccaggtttatcatggagcatttcacggctttgaggacccatattattgtaacccaaacctgatatatctgctggaccacctaacccagtgtccatttgatttaagtggatattatgactagacccagctcccacatttggtgcaaacctatgttctggagcaactggaggaatggtaaggttgggaggaacagaaagcatattcacatcaacacctcgagctccaggccacactagaggccctggaaatggcggcatgaaaacgccaggtaggagaggaggaccaggagaatggggaatatttggccccatatgctgcattggtcctggtggaagtccaagaggaccaaatggaggaggcatgattggcattggaactccaattctttgagaatcccttccatttggtctaccccttcctcctctagatgacctatcgccttttggaccttgttgaggaaacgaagaaaccatgcttgtgctaccacttggatctggttcaagatgatcagaggatttatcatcagttcctccaggtactgaatctcggtgtgctccggtttcaaatcttctaccagaaacagagccctctcttccaaagttaagattactattaggtcgaatctctattgagtctgaattgtcgtatcggttcccatagtttgagggacctctaatactttcagatctacccctagaatctctccgatatccagttcggccatggaaattcccgccatctagcctttcctgtgcattcctccattcaaaatcatttggctccttagtatctcgtaattgagtgttcctcccatagtccttagaaccttcaatgtctcgggttttctcattccaattcctatccctccctctgtcagatttatcatctctataagcttctcttgtgtcaactctaagagaaccaccagtttcatcaacataaacttcatctaccctcctgactgatgccctttcatcttgatcccgttgtccttgcttctccctactaccctctcttctctctgaactcctagcagaagcatcagggctaaatcttcttgaaggttcccaatcattattgtcccctcttcccctccttctatcatagtctcgatccttggaatcatcagggcttctcctttgaactttaggagatcgtgagtcccttctcaga

SEQ ID NO: 301 - DNA, 1602 bp, Zea mays
  source 1..1602: mol_type = unassigned DNA
ctccttgattcattcctatcatttgaaggtgtaatcattctattatcatcctgatgcccagtttcatgttcatatccatgttttctggatatatccgaataatttctgctatccacattctcctgattttcttgctcctccttccaagtattccttgcattaacattatcatcaacctcctgcttactgcgacctctactagactcaggtccgtccatggcactctctattatatagagtcaaactgctacttttcccaacaaatacaactgtcgataaacctcggcaaagaagttgagattcctatacacaaaatactgataaacaatatcaataccgtgggtatacaaaagcgaaaggaaaacagtatacgacaggagaacttgtcataatggaactgcaaacaaggtcaactgaaaggacgtcagaaatctaaatttgctgcacatttagattaataggtagaaataagcatgcttacaacaaacctactcaaggttagaaaaggcgctaggtggtgacccatttaacgacccagctctcccagagtaaccagccgtgaaagataaaaaataaactttttaactcattttgcctgggtttttttaccctcacgagactattgaaatgccactgctgctctgatccacaatcaatgaacaaggatggccgacgtttagtcctaatgacaatgcaacaggatcccacttggatggaacagcctttttttttacttcatctcaaagaactaatggagaagcctttaggtgcaagtagtacaaagaaatgaaatatcagtcgaagctagatgcttggtctctttggcatcagtcaaccaagctccacttaattatagagagcattaaaatagcctgaaggaactttccctttcccttggactgaagatttcagattaagcaattctgacatataatcaagaaaattaaaatgtgatcgtgatcagaataaattgtaaacatattgcaaatagagttccacagctgtacttaacaacataatgaacttcagagtcaaacttcttttagtcaccaattaaccttgtttgtcatattactagaaagtagagttccagtgaagaaataaagaaaaggtggcttttaaccctgataaacagggaataaccacctccaaatgttaaaggagcagatttccagtgttacaacccaaaatattaaactatttttagaaaggaaatcaggaaaagaaacaccgagcgtaagggcacatcgaacagtatgaaacacagccatactcgagttgaactttatcagaaacagtgcaatatcagatgttgaagtgttaaacagagagatgctaacctagtcatggtcttgatgacacaagcctaatatgtgaattgtacttaaaaccaagccggcaagtaaagctgcttttcaccttcgtgggcgcagctggccggcacggggtgcggctggccggagcggcggcgcggctggcgtgaggctggtgcgtgcctgcaccctgcggctgcggctgcggctgcggttactcggttagggtttggaactggcggccgagatggctactgcctgctgctgcaccggcttccagcccaggaac

SEQ ID NO: 302 - DNA, 738 bp, Zea mays
  source 1..738: mol_type = unassigned DNA
gccgccgcgaacggacctagggtttggggcgcaggaacgggagtcggaggggagattgggagaagcgccttcacgtcgagcgtacagcagttgcgcattggagaagttgggccactctgtattgttgggccgacggagatgcatgggagagcaggaggccacctattgttttgggcgggcccgctcttgcgcagaactcgactccagtccagattgttcgtgcgaactgcgaagcacgtcgtccggtcgtcggctcaaaccagagccagcccagacccgtcctcgctcggttcaactttgcgccgtcgtcgtgcgatcggacggctgttgtggacgtgtggcctcaaagtagggtgcgccgtgctcatcgtcttgtccgacagaagagtcgctccaactgtccaaccacagctccgcgccgccgccgaggacgacaaaggcgtcccgctgttcttgttgggcgcctcttcggaggtaacgtcggtttcctctataataaatccgcagcggtttaaatagtacccgtgcttctccaacggctgaatcagctcgctcctcactggagtaagtgtttgattgattccacatgctctaaattgaatctgagtgtgtgccgcggcctgcgggaggaattcctcaccacacgcagttcttacaagcctcactcattggcctgcagtgttattcagtttttttttcacttttttccacacgatgacattgttccatttccattca

SEQ ID NO: 303 - DNA, 1226 bp, Zea mays
  source 1..1226: mol_type = unassigned DNA
caatcgacagtgatatattattgctgattcgtggcctgagtcctcaccgttgattttttagaaccttacgtcatttttatatttctaaattaaaaaccaccattgatgggtcaacaatttatagtgaagtgggtagcaatcatgtgcttacactattacatgcattgcaccatctgaacactatgtggataaatttatacctcatagctactcaaaattgattgttctatctaacacaacaatttttatatactttatatgatttcgtcatacattcagtgatttttaatatgtactttgctaaaaccttatccggagttatatcaacccttgctacatctttttgagacattacaaatctatatttagtgaatctcaatttctaattctaagtgaatgtcatatttttcatccacacattaaatttagactttgcttcttattatatattctattaaaaatgtcaactatattttgttaaaatagattctagaccgtaccatacattatattctttgatattacagtgacatgacaatagtttcaatctacaccgcaacacttaaaatgttgaattatcttctatccaagaatcatatgtataacggcactgttttataaaaaatggagttctcacagttgggttccaattttggtatgccaaggtgtatacaaagtaataacttacagaaaatattatggtagagtttggtttgttaatgaaacaatttctcaccaccaataaactctaaatgtatatattaaccgttaatatatataatgtatacttgtactttatggcacctggcatttatgtttattttcaattgaatattggtagaactcggtagttttgaaatatatatactgtatttttttcattgtttatttttaagacaaactgtagctatcaatttaaggacctatttttttgaaaaaaactaaattactggatctaaaattttaggtgatctgataacccacacccaaatattttctccatccaggaaagaatggaagtctcgtttcccaaggagtcaaaacattctaaatcttcataggattgcataagataatatcttccactatgtttgtcataaaaaacatttgacgactaatgtattattttttctgaagatcatatatattaatagtttctgtatatatttaatcaaattggagattgtttttggggaaatatggatctgttactagtttactactaa

SEQ ID NO: 304 - DNA, 763 bp, Zea mays
  source 1..763: mol_type = unassigned DNA
tgtttttgagattttcctccttttgggagacgacaatccgcagaatacaaaacacacgtgcagacaatgggccgaaacgtgccatgagtgctcgggctttaaggaagagtctccatgctattgagctgctaatcctcgctctgtttcgggccgtatgccccagtccggactccggagttcccacaccagcccgcgggctcgatatttgctttcgcaatttcctctcgtcgctcgccgctaggctctagcgcctggtcactcgcagtcgcagcggagattttggccccgtgtgccgtgttcgtgttgcagcctggttccgatcaaccgcttcctggctatctcggcgtccttcgagcgccgctgcgggtgctggctcggcgggtgcggcgacatctgctcctgcgccgagggtgttcgacggaatgacgcataatgagagaggtagccagcggttcttctctgactgtacttttttccccattatcgaaattgatgatttgatgtgctatagtagtgtcagtgctacgtagggctggactggactgaaaatatgccctgctgctgcatgtagagtacagttttgtgtgctccgtgtctctgccattccccttttgcaatcttattgcctctgaatttctgcatcatatgaccagagtccctgtggtttattttcgttatgggagttgggtccgtttttttttctttttgtagaagcctggttgaggtaaactctaagtaaggccccgtttggtttggagtaact

SEQ ID NO: 305 - DNA, 2237 bp, Zea mays
  source 1..2237: mol_type = unassigned DNA
taacttgtgttttgtggaacgctgtttaacgccatcctgattcagggtgagctcatctggaaaataagaatattactgttagcaaagcactgaattgtttaatccttcggtactgttgttctgtcattccaaatggtcgtgccctagcccctctgattttatggttatctaacaattctattcagtaaacaaattctgcaagactgaaaatggacatgaaaaatgaggctattatgactggagtactagtgttcagtgtcacaatataagtgctatgctaaattcagctcgcaaaggtgttaaacctgcagctccattagtttagctcctgatttattttttcaaatgttttttttcattttcaaccatttgtacagattttagtgaaatccggtgtattttctcattttgatttattttaaacttgcattccttttatgacgggatgtaaatttgatagcagaagatatgtgaatgagtatcacaaggttgctacttgtattaacttgctatttctttcagcgatgcaatgcaaaagtttctgattttctgaaggtggacaaacatgctgaaacattcacagttcagtctgcagagaattttttctgctcttagcgtcaagcaaattccacttcctttttgtaagtacaaatcccactttgtgaagtttgcctaaaagtaaaactgagagagtttggggcagctgccttgcttggatgggcatttggtttaaccatcaatctataaaacagtgtgcctgttctcttattgctgtactctccggaattcattttggtgctcgttctttttgtaacaagctaaacaatggaattgccctaaaggatagaagccttattaggtttgacaggaatttgattgacatgtttacgctacatgaacttttgcaacagtgtacacagaagaggtccctcttggttgggaaaggctgccatggtttagccatccatttgggtttggtaactgatactgtcacatgcaatattctcatcaacttgtatacaaaatgtggtaggaatgattgcgctcgccatgtttttgactcaatgtctttcagaagcatagtctcatggaataccatgattgctgggtatacctgcaatggagatggtttacaggctctgaagcttttttcaaagatgcaccaagaagggacacagatgagtgaatttaccctgtccagcaccctatgtgcatgtgctgcagaatgtgctactatagaatgcagacaattacatgctatagcaatgaagcttgcattggactcaaatagttttgttggaactgctgttcttgatgtttatgcgaagtgtaatatgattaatgatgcctgtttggtttttgagaagattcctgagaaaactgcagttacatggagtacattgtttgtaggactcatgcaaaatggtcttcacgaagatgcattacgtctattccagggttcacaaagggaagggatacaattgactgaattcactctttctgctatactcagtacatgtgcaagcctagcattgatgattgaaggaatgcagctgcatgcagatgttatcaagtatggttttaataacaatttgtttgtggcatcatctcttgtggatgtttatgcaaggtgtgggcagattgagaaagcctatctagtatttgctgacatgaaacacaagaatgttgtcctgtggaatgcaatgataactagttttactaggcatggtaaatctttggaagcaatgattctctttgagaaaatgcagcagtcagggatatctccaaatgaagttacttatgtctccatgatgtcggtgtgtggtcatgcaggtttagttgaagaggcccgatgctactttgatctgctggttactgatcagactgttaaacctaatattgttcactattcttgcatggttgatgttttggggcgatctgggaagactgatgaggcttgggaactgattcaacaaatgccatttgaaccaactccttctatgtggggatctttgcttggttcatgccgtaagtacaggaatgtcggaatagccagactagcagctgaacagcttttcaaacttgaaccagaaaatggtgggaaccatgctttgctttcggatgtatatgctgccagcggaagctgggagaatgctgtgttggcaaggaagtatttgaatgatactggtgcaaggaaagatacagcctcaagttggatgtaggcaaagccgcaaagg

SEQ ID NO: 306 - DNA, 2176 bp, Zea mays
  source 1..2176: mol_type = unassigned DNA
ctatcatagtagtaacagcagttagtttatttagttagaatctcatggaggccacattactcattatgtaaattgtggtgcttctgcttggcaatttgcagaaataatgataaagcttgaccacaccaattgtgccactttacagactaatgaaagtatataaaggaaatgaaatgatcagttgtcactacctgccacaccagtggcatgtattttgcctttactatcattctcctcttcccaactaaattgtgctgtagaccaaacagagcatatttaatgatgccttttcctaatctaaacctttctcttagctggttcctattgattaaattctgatgagaaagctggtccttttgttgttttttactttactgattattttagtcacctatgtatttccatttttcttgactaggctatagcatcacctataaatctaaacaatttttttctcaaatttggatttatggccttgccatttcactgctttctgcatcatttaaaagctcaatgcacagctcataaaccagcatcttttgttgatggttgatcaggcacctacttgtttgtggattggcctgcagggtccataagcataagcataattttctttttggtttgataaggtaaagctttctgctacctgtttgtttataagttttatattcattatcctgtacgtcagtatgtgccagacctgcaggatccaaaagttaagaacaacatgcaaattgaaccaaacaaataattgcaacatatcatggaaacagtaacttgttactccagtagattgtcacagcaagctaaaatatgaaggctcactaatcttatctgcggtcttggatcttgatatggtaacgcaccatcacagccctagttgcctatgggcaagcaaagtcgcagaccaccagtaggggggaaataatgcatgaagaaacaatgatgtcttcatgagttctgcagttatctgcacaatttgcattctctaacccatgttagatgccaaatctttagtgaatacagacccacgtgcaattgtaagttagtcatggaagcattgttatctgattttcggagtacggtgaagggcccactctgctgtggacgtggaacgagttgaagtggttgctgttgaggattaaaagatggaaccatcctaaagcaatattgttcagctttatgagtgcatgccattagtaccatatatattgctaatgcatgtctagtattattaataccatgacacgcgtcatttttgctagacagaaaaggattccagcccccatagctttagtggagtgttcatttacctggttcgttggctgttagctggcaacgggggcgattaggctgaaacgacacatttgatctgagaggaacaggtctgcgtttcggaagtagtagtaagaccctggactggcgggtggttaaaatgtgaacatcagtgagtagcagctgatcgtgattggacggtcaaatttggcagtattaggatgcactagctagcactaggggtgagcagtggatacattataaaataatcgaattaagctagagttacctgcacgcatacaccaaactaatagcataggaccggtcaagattcgagatggtggacagtaagtagattagaacccccaattggcctgcacgtgtatgcatgattggccggcagacgtacgtatctggtaggtggggggaggcggtggcatactcaagcgggaaacttatacacatcatctactcccgccgttccaatgtacaggttgttttgggtttttttaggcacacaacctgtattatatatctaggtatatagtagtttaggacagaggatgttggttaaccgctgaatattgcttgcttttccgactagttaatgttttagtttaattaagcttgattggcagacaagcgattgtgataatctccttgcttgtattgtatgcatgcagggctccactgtgcctagtgaggcacgtcttgcggaaaacaagtgtatgttggtcattgccgaaatccaggaatcagttctccagctactcccttctctgccgttggattacgtcgtcacagggacggctgagcatggtgcaggggacatgtgaggcccccctcgccactggcgttgccggaggtacgcacggcacgacgcagtgaccagtgaggtgag

SEQ ID NO: 307 - DNA, 997 bp, Zea mays
  source 1..997: mol_type = unassigned DNA
acggagaaaattgtccgcgctgtcgcgttaaagtcatatatgtaaacttgaaactgaaagtaatacaagggcacaaagcatattaatatgactaatttacttattcttattgataaaaaggttgacacaattgaatattgtagtgattatactaagaaattgttgcccaaattagaagctgaaactgtagagtaccctttttgtcttcttcagtagtagatatgatgaatctcataaatctcaaaatcttcatgctcaagtctatgatgaatggacaattatgaaagctactaaaccacgtcaaataatatggtccaaccttctaatctaaggaaactatacgagaagcaaatcagacaatctatggtttatgttattatctttttcattgtttctcatttttgtttttatatgatttttcttgctgatatctctgttgttacaactttataaaatatggagaaggtaccctttctgaaagtagtggtggagcaacgagaaatcaagatggtttgagtcaaacactcaaacattccccaaattgcactcattatattactcgcatgcctaactacacttcttatgtttctctcaaaacaatagtgaatcccttcgcagagccaagcagctataaggacataagtgaaatatttctatttcatcatttttaatgttttctatttttgacagttgtaagcacattgtttaaatctttgacagacattcacaatcattatactaagattgtgaatatgattgtcaaatatctgtctggaagtgcaacattcttccccagatttgttgcgttcaagtaattctgttgtctcactttatcgttacctactgtcaaaatattattcttaacatttttgcatttgataacaacttcacaccctaactattaaattgttgtcattgatagattctttgttggctttgagctctcttgattgttttatctcatcattttctatcttaaaaaaagggtctatgcaag

SEQ ID NO: 308 - DNA, 552 bp, Zea mays
  source 1..552: mol_type = unassigned DNA
ttgattatcgaattatccacctttctaatgcatattttaagagtgtttatagtgcctaccaaacagggtggctcaccgaattaaacttctcatgtcaagttaagtaacttggctagtttggtagggtccatctatagttaaactgatcatctctagttaagggtccatctatagtgcctgtttggtagggtgaaattatctcaagttccacagcaaaattcaaacaaaaattaccactgttttatcccctaacaaaccctagttctggaaatctatatgaataactaaaaatataaccagaacaaacgcaaagccactaaccattcataaagcccagctaaacaacaataggcgcacaatgttgcaagcccaaaaaatctaccaagcaatcagagttaaacatagaccacaatttcaaaacaagcaaacgcaaatctagtatccacaaaaatgttcagctccgatgcaaggaactacagaatctccaacctaataatagccgccctagaaaaagtgcacatccgaatctaatccttgagtttatatatgaaa

SEQ ID NO: 309 - DNA, 609 bp, Zea mays
  source 1..609: mol_type = unassigned DNA
accaaacactctgcacccacacgagaccaagttacactcgcgactattgtccatgtgctgttgtgttctgctcacgctagcaatcccccttccaaatccgggtttgtagatctagttctatttggtaataaaattacatcttgtgtagcttttcttttgcgctcttatcgtcgcacgttgttgctccactctgcgctctaatatcgaccgctaatatggtatgtctttgacttctttgtctagtggtgctccagttctacgatattcgatgtttttaatagcaccaattacccatgcatgtgtctgcacatgtggttcgcgcctttgagagttcctcaccggcaatccagcgtgtcatgcttatcctatcgctcctacatcgcctgtaatcccaaagaaggctactggcgaggagttaattgcacactatgatgatcagatgtcctcttatgactcagtttagtccttacaggacttggttagattagggtgcccatgtcagtgttgttcttgcctcaaatatggaggatcgtcttaatgctaatattgttgagtttgagtttgcacatcacatgtgcgctttttgtgtggtcgttacgagcctattga

SEQ ID NO: 310 - DNA, 1166 bp, Zea mays
  source 1..1166: mol_type = unassigned DNA
tacacgctctagtcttcccagccacaatatacagttgcaaccgaactacatcaaatgacatggtctcaagagaagctgagttgcatttcgagccattcttgtttgaaatcaaataacaatcagtggtaaagtggtaattacaaatctaaaacgttaaaccccggtaagaaacaacaggggtcatcattgccaaccatcaaatcttgctgacatctcaaggcccatgcttattgtcttacttatcattagacattgcgtcatcaggggctgcacaaacaaaactgtcacggatgtgtaataaaaactttggaagaggcaaaaagatactttggtatataattgaccactcctccatgcactacatgaatcagtgagcaataaaaggattttacagtgcaatggctaccttgtttgctcccattacaacagcatgcaaagaattcctctaacggacgtttaggaacaggaataagcttcccccacgaatgctagcggccagcttcaaagcaataagagagtgatcaggcgcaatagagggaaagaaacatgtcatgattctaccaagagctactctatttcatcagcattcagcaagcatatggaaatctgacctgaaaaaagcaagacctgtcgataccaaccacaactgccaacttagccttagcccttactgttgaggcaaacttgccaaggaaatcaacgataagagcctaaacatatacagaaacaaaagaacatgagaacaaaaactggtatggctatgatgccaataaacagatggttccctaaaatgcccttgaatatattcagctcatctagttcacgcaaatcgaatttgttgaacacctaagacaaaaatacacgtcaggccattactgtatttgttgtataaagctctagagtcacattagacaaaaaaaggcacaaacttcttttctaagcaaaagctaaagcataggacctggcagagaacaaatgtgttgaatatgaaggtattttcactttatctggatgtgttggatcatcatttttcagctgtaggaggcttattcccttgaagttgagagtgagaactgaaacttgaaacaaagcctgaacaaagaacaagtgtttagtaggaagatctataatatgaaatatagaataaagcagcagcatatatatca

SEQ ID NO: 311 - DNA, 542 bp, Zea mays
  source 1..542: mol_type = unassigned DNA
tgctaacacatatatttttgacacttcaataacagtatacagaggtaagcactaacataaatttgatgcgggaatggtctagcaactaaaattaccaagaatcttatatttacaatctaatgcaaaatacttcatctgatcacaaaaatgtaggtccatttaagtttgtcgtaattcaatatcaccaataattaaaatttcaaatagattggcaacataagactgatgctagcagattcgttataaaaaatattttcgttttctatttggaatttataagtattgctgattattgtattagagaccatgcatgtcaatgtccaattgatttgtgtaagagaaagtagtgtgcccgtgcgtcattactttcttcccttatcacatgcttgaaattattgagttcagcaaagtcatcaccgtacaccatcttgatgttatccacacaagcactaagaatacatgcagatatgtaaaccaggaaagatagcagacctggcaagcttcccggtctgtgtggcacgcaaagaagtcatcaaatacct

SEQ ID NO: 312 - DNA, 779 bp, Zea mays
  source 1..779: mol_type = unassigned DNA
ggctagaacacgcctgaaatttgcgtcgcacaaagtttatcgacatcattattgagccgttaataagcagcattatccaccacctctacacgcccaatgccatcagtgagtacctatacaagcaaaaggggggaggtgctgaaccgtagccccagttttagccactcgccgcagacgcaagagagagacgaagccttagaacttcaagcaccaaagaaacctgagaaatcacaaaatacacaatcatgtttcaacaggtctacagaccccggccccacgaaccatataggattggatcacttgacagggaattatcacaaaatacacaagcatgtttcaacaggtgtacaccctaaacaatatcacaataattacacattcatataacaagaaacaatagtaacaagaaaaaacctgccaatccaaaagtatgcacacaacaggtatatatgttgtgcgaaagccagggagcagaagtggcgggggacaacagtgtatttagaaggaggtggagtggggactgtgaactgctcctgaatgctgtaattgctcctgaaggagttagttatgacgtacgaccgttgaaagacgcacacgcgtatgtataggccatcagtatggttgttctcaatatatgccacagcgtcggtgctcgcccgtgtctcggctgcgttcaatgccccagaaactttggggtccatatcgatggtaaatccctctttcctcatggattcataagacgggtcggcggcttagtgtctcacattcagtcgcgacgg

SEQ ID NO: 313 - DNA, 620 bp, Zea mays
  source 1..620: mol_type = unassigned DNA
cagctctccaggaagagctacagaaaccactcactgaaaaggtcaggttgttcttctcgttcgtaactactagaaccagacaattcttaatactggaaagtattgttctcgatcgtcgcctgttcatgaagcatatgtgtcactgaatgccagcattttgtctctgcaggagattgatgagctatgtgatgagtgggagccagagccgctattatatgccctccagtaaaggagggggctcgaagtgatactacattggtattggaaatttagcagcctaaggaagtaaattcacaattaaatagggtacgctgtggttgttgttgcatgagtaaccctactacatatcatttcatatctatatatggattaactaataagtgatctcactcttgaagttgtgggagcgttggtccagttctagcttatactagtttcacttaacttaatagtgccatgtgtgggacctattatattgttttggaacgtttacttgctagattatatgacatttaaaccatgtatttatgaataagcagcaagggacacattgaaccacaaagaatttcattttcccttgctacccaaatgtctacatagctacatgtgagagaggattg

SEQ ID NO: 314 - DNA, 2529 bp, Zea mays
  source 1..2529: mol_type = unassigned DNA
tcccccataccaatatctgtattacatctaatatctttggattgacaatgcgtcttttgatcttcagaataagcatccttatttgaaaaaccaccaatgttcttctcacccacactgctattcacactggcagatgatgggctcgcaactgatgtaccagaaagcgagacccactttgaccaatcataacgccttctaatcttgtcatcctgtcagtagaccagcagaggataaggtaaaaccaaatacctaaacagaacatggaatttgaacaatgactattgaaataacattgcaacctgaacttctagaagacttgagcttgtcagtgcatccaatatcaggtgtatatctgcggtcattttcttaagctgcaaataaaaaaatgagttgtttcctagcacaagggcaaaataatagaaatttaatattaagcaatctggaaagaaaacatactctattgaaatctgcaagttttgaaactggaacccaaccatgctcatccattaaagatttcaggaaatcatcacgctccagatttgcatcactgaaaaacatgattgcatgaacaaaggattgcatgccacacttgctaaaagaacatttaatcgctcctgatgttatcgaaacatatgagattttatcagattgtaggctgtattggtatttgtgtgcatgttgcaccatgacattacaaccttgaagtgtgatacaacatcaaactgaactttttaacatcatgtttctgacaatagacaaaaatccaattaaaataaactatttggcaccactacccagcacccaataaaaataaatgagaatctatcaacatattgttacaaatccacgcatctatgtttataggtatcatcacgctttgttatgactccaaaggaagataataagaatttacctgaagtagtactccacttgagttagtatattagatcttaactcagcagcttctggggataaaacaggattaggagctggttgattttgaatgtagtgtgatggacttctcatcgaatccataggcacagtgggcatgtaataatacatgggagggataggccctgagtttaaagcatttatcaatatttgaaaactaaaaagaaatctgaactgcaaacatgtcataaatggtgagcatagcattaccaggatatggtggtccattgatgtatccaagaggcaccattggtcttacaaaagctcttggcccaagaccttgtggtagatttgtgttttctctagtaccaaacatctgaggattttgccaagcctgtccataatggccatggccttcaggagaaggatggggcctagtgccatgagtgccaacaggaggccgccaaagatgaggacctcctcttggatgtggaggcgttggcctgttactttcatgggcaccaacttgatctactggaacaaaaggaggcacggaattctcaaaaccagactttccaacatgccggtcatgattcgggactgggataggaaatggctggtaagaatattcttgtagtatcattggactgggaaccacggggtaaaaaatgggttgccctggatgttggggataatgcattggtggagggtaaggtggtgcaccattagcagcaggaaaacgtcgcctgggcccatttctatgatgggcttggtgatttctgttgggatttccatttccatggccatcaaacttgtgcatacgactagccacctgacaatgtttgcccatttttatcaaactgaagcaaataatgtagtaaatggaaaatgcacataggatctaacctaggaagagtgactctaatcgtatatgcatcagttgatcagtaacggaatgctataatgtctttccaaaaaaccaaagaagcaccacattttttattgagatacaaaagatgcaatgaagcaaaacaaaaccaaaatagattgaaatgtttacatagtagagaaagggggatgggaatggcaagacctgccacaatgcctatcagacttcagaatggtgttgtgtcaaaagtgttatacagaatacagggtaaaagtccagcacattcagagcgagatttggactggccatcctcgaaatgaagcatgccacgcaaaagaatactacctaactgcaaagatgatgcttcagcagttcagctaggcgacaaatttgagttaccatcatgacaagtgtaacatgcttcaaacgtagcgcaacctggtcagctggaacccaacatctaccatgaaagcactggacaaaaagctggagctactataaaatagctatctgttactactcgccaacgaatcgacacacacctacattcaaccaggcagcacaaaaaaagtactgtaataactacccatatccacggaagtgatcaacagctagcatttgcatcaaaagtaccttacaaatgagctacacgaaaatagacacagtcacacagacccagtgaacaataaaacttacatatgtgagcagattagaaccaggcacagatcatacctgcgatggagccgacg

SEQ ID NO: 315 - DNA, 2131 bp, Zea mays
  source 1..2131: mol_type = unassigned DNA
tggtcttgagagtatcgctcgatggatttagagagggttatggatgtaggagtgatttggtcatatggattttataagaatttgagagtgttgtttgatggatttaggaaatgttatgggtgtaggagtgatttgacaggatgggttttattataaagttaaagctggtgggttatacaaggagtatagtcgtatagacttggtgagactctgtctcctgcttgcttttctgtttgagttctgatgggcctcggcctcttttaatattcagagacctggtttgaagcaagatactactgattttgcctggtgggccggacgggcggtggacggtctccatttgccaagctgcttgtacagttgtactcgcagaacttgcttcatgaccatgagcacaagctagcaacatgcaacattgcagttgcagatatatagtacatatttttttttggaaagggcggttgcaggttgtagctactgagataaaggatttttttataatgaccgctattagcaaaaacagttgaccgaacgaagtggtcgacgtccccttccggtcgacaacatttctgaagcatgcatgaatctgcttgttaaattattgggtgcgaccaagtagctcgtgtgtacatgcgcgtttacgggtatatgtaaggtgcatgcgtttctttgtccttttgacacagtccttagttctgcgccgaaacttttacgctatcatcactgtcatggtctctataagaagtcataaaaatagataaagctactatacaatcaagttttccgtatagtatagtcacgccgtatataattaaactatcagaaattataaaaaagaactcaaaaaacccatagatatgcagtattattcactctatttttctttaatatatgttttgatttacgatgaattagaatctaaaaaagacatggttattttacgaagcatgattggatccggacccccatgcattcacattcacttacgcgccgatgtggcatcatccgatcatcggtggcggcggcgatcaggtctggagctcggagtcggacgcggtcctggtcgtcccaactccaactccatgcagcgcttacgtgaaaggcgaagccgacaagaaagagacgagagctcgaatcaccgggctccacctccatgacacgtgagcagctgaaccggtccggtcccgcccggtcccggccccagcagcttcgccacccacccaccacgacaccacacctcagtcctcctcacacaaaaacgccaaacattttaaagcccccgcctccttccccgcggaaccaattcatcccccctcttctgtccagtccattcccccattctcttctcttcacgattccgcgggcgcggaagcccgaagcggcggagagatgtgggtgttctacatgatatcgctgccgctgacggtggggatggtggcggcgacgctgcgctacttcgcgggccccgccgtgccggcccacgtcctcgccgtcgtcggctacgcatggctctcctccctctccttcgttgtcctcgtccctactgacatctggacggtgcgcctccctcccgccgtgctgctagagtgcagagtgtgctaatgctgtgcctgtgcgtcgccgcgacctctccgccgctccgcttagtgcgcgcgctatcactattcactaattaacagagatcatttgcgcgtacagccgggttaccagtaaactgtgctggttgcgttgcgcggtcgtgcgactgcgggagatgggagccgttttggttaggacactggtaatgtagcgtcagaatcggagtttggatgaaccatatccatttctgaacctgttgctagtttactaagaaatgatttaaactggattaacttatgaataatggtggttcgatagcgtacccagtagtctggtaggtaatagtctcgatgccaaggtactgaaggtaggaattcgtggaaactgtcacaatcaagaaagtgattggggttagatggcgatctgaaatcgtcaaattggcattgggctggttctatgactcgtcaacggagtttgttgttgaaatttaagcacaccatcaacatcgataaagcaagtaggtttgtgacttgaagtcgcggccgcactgacc

SEQ ID NO: 316 - DNA, 2081 bp, Zea mays
  source 1..2081: mol_type = unassigned DNA
tcgtggcacaaatcatggctagtctgaacgggtcgaccattagcatgctttgtcaaaaaaaagaacgaacaaaacaaattaaaaccggatagacaaattagccttcatatgtatcagtacacttatgacaacccattaccacaaaaaatagtgatttcgttaaaactatcattaaggaagtgccataatcattcatggacatagaaaaatacacatatcaagtatcattcaaagcataaggtaaactgatcatattttcaagcatccagtactccacgaagaaagccatccacgtagaaggaacaatacttggcaaaacaaccataaagagggggaataggtgaatatgcataccttcgacaacctagacagcccatacttaaccttcgcaatgattataatatgtgtaggagcttgtggtgatatgtctctacatgcaagaacctgcagttatagacatacaaatgtgacatcacaacaatttaactgtaatcacatactacactaatatttcaatccgattctcgatatccatgaagatacgtttcagaaggtgtttggcttgccaaggaaatcaaggtgttatttcaggagcacaatttttttatgatagaccaattaatatccttcttaagcattaaagatttgaatgtgagatcctctgctgacatggcagcaagggtgatagagacaacttacaaagattttggagcccagaatttcaaggaggaatatgcagggataactggttcttgagttttaccaatggcatatcaaggaggaacatcaacatagcaccaaggtgacaaaggcattgaggcaacattaattttaaagtgtaacatactaacattcatagcattataaacaataggaactctaccctgatggcatagataatactaaccttctcatcctcataaaccacctcagatgggatctccttccgaataattttgtcaaaactacataaggcagagaagtaatcatgtgaatagaggcgtttgcgagctgtatgtgtgaagaggataaattgtaaccatatacaaaaattatcagaacagccaacaccaaagcttttcaagtaaaaaagaatggagctcgaatttagcacaggttagctagtatttcacatatataagtaacaataatgatgcccaagcttgattaactaacagaaactgctatgcagagaagttatctgaagatttctgcaagtttccctagccataggttgggtgcatcgtgacggataaacaaatgctgccaagccaatgatatattttcaggagctcgataaccaattccatcagatgccataacgtgtgggattgttaagccagatgatgtgagctaaccaaaaactgctccactattgagcttgtcttatgacaaatgagctcctgttgaggagaggagattgtgctcctgctcctgcatgtggtgaaccgggggtttcaattgcatacctcaaacttaaaacaagcaaggcccttaggtaatgttgccatctgaatgaccactatggacatactgcgttgagattatcttgattcgcccaatcgagtgacaatcgaagcacataggcgtctcctataaaacctaccaaactcaacagaataggaccctgactacatgaaccgtctctcacagtgggaatgtgggattcagtactgaagtccaaccaacacctaggactaggatacaaaatccagggtactctctgcttttgcttatttcactagaacgaattactcgccaaaatagatatacgctcactacggcagcttccctaccgaatcgaaacgacggtgcaggatttggagagaactgatagaggctgacatggtgggggtgctgttgaggtcggtggcgagggcggcttccttctccccggatatggctgccggactgccgagcggagggagggataagtgggaagcgatgaccgcgaggcggttgccgctcgccgtcggcgggctattgcgcctcatccccactgatttccgtcgcaccttcgctgctcgcctgcccgtcttccgaaggtgaagaagacgtgaagttgtagagcagttgaccag

SEQ ID NO: 317 - DNA, 4938 bp, Zea mays
  source 1..4938: mol_type = unassigned DNA
cgatctggtcgaacacgaacttgttggcagcctcggtgaagtgcacgccgtcccagctcaccctcttggaggggttttcgcacgacttccccaccaccaccgacgtcccgttcacctgcttcttcccgccgcagccgacgctcaggtctaagttgtaccggccgccgccgtacccgcagcatgtcagcagagggtcgtcgaagcctgcaccacaaacaatacaaacatgagctccttccgcgcgaggaaacgttcagagccagccagcattagaatttagaaacaacaccaacatgaacgccttaccgagcttattggcctggctgatgagcttgtacttggcggtgtagacgtcgacgtaggtgaacgcggcgtcagggtgcgtcttccggaggctcgccacagtctccttgagcctgaggttgaatagctgcgcgaccttgttgtaggtgacggagcagccggtgccgtccgctgggatggcgaggtcagggcggtgcagcagcgcgtagggcaggcagccgagcggccctgtgttgtgtatccagaagtaccttcctccacgcgagtacacgctctgcaaatttgcatgtattcagctaaatgagcagaccatccatggaacgttgtgtgtggtaacatcttccaaagagcaacagcaacttgatgcttgctctgccaaagagcacctggattatagatgtgagcctctccatcagatcagggattatggcttcgacttcttcggtggtattgttaacaaagtagcttgaggtgatgtcgttttgaccgatgtcgaaggtgtaaagtgcctgggagaagtactccgcccttggtaggatctccctgtagataccgcctacatgtagaagagtaagtgttactgaataaaatcttgacgggataaaacataaaaatactgatggagatggtttggggggtttctgttgtcacctttgttgttgtagacgagttggcttctgttgatgaattgttcaaactcccagaactgcacgtccaaggaaatggggctgaaaccagagaggaacagcgatgtattctgtcttctgatcgatgaaccagctgttgcaaagttggctccctgtgtgaagttgcttccgatcgagttcaggtacgcactgaggtgagtcagccccaggctttcagctgcagttcgggaaacgaagagataaagagtaaatcaagaagcaccatttgatcatttgtcgctgaagagttactgtcttggcgctagtctatggcaaaacaactcgacacttaatgatcagtacattccagttggcgaagtctaggcctctagggacagaagcttctgttaccagttgacattcattgcgaaatctaaactgcgaggtgcatgaatttggccaaacacagtgaagccttccgaaaattcagtagaaatatagaacgaggtagttccatacaagttgaagccttgtgcattcagtttcttactgaattcatgcatttcgaacaggacctgcatgtgttttgtagcacttcccactgtctgctgttcagattctagtgttatatatacccttaaagttaccaaaggacagattaagaaaaaaatgtcagtgtcaccctttatccttcaactctggtgacaatctataaagtgaaacatccgtatttgataaaaaatattcctccactgccacccaaatctgattccctcctcatgccgctttgcccccactatattttcatgtacctactaccacaataggctaatgcttcttcctgtccttcccaatatcagcatccccaaaaggttaaagaggagttcgtctaaaataaaaagggctaaaggaagatcaacagggcatctccattgctcgtactgtatctcccaacagcatggcagtggcctatgatcgtatgcaaagatactttgcccgaatcactgaactttttgtcagattgcttggaatgaaaccaagatcgtgccagaaaggcaggtcaaaataatcacacgacacgcgtgctcacgtgctggattgagacggggacgcgcatcatggttgccctggggacatgcccgcacgcgcatgggccggtcgaggtcgaacggagcccatgctcgtccggcacgcggcacatggtctgaggccggtgtttcaggggtcatggtctcgtgtcagggactcggggttggctttgtcgtttcagagatcctgagcaaccgtctgcttctgcttgctcggttcggctctctgctcgtcgcgttccagccgagacgaagtgagaaacagatggtgattggtactaacgaaaactctaaaagccgtacgtactggagtccttgttacaggttactgctctaatttttttttttttgccccaaacttatcttcgccgcgggaccaaaggcagaacgagttaacgctgtgcattcattggtcccggcaagtgaaggcggttttgggtgtgtcaatcgatgggcccgacgcgcagtgcaatcatagccatggccatgggagggcaggtgaaaaggtgaacagtgaaaacccccgcgcagaccgtgtccatggcggcgggttcagcggccgagtggttcgggggcaggccgcaggcgagacgtacgagtacgactgtacgagcgcgcacgtaccgatgaagtcgatgacgaggcgaccatcgcagtagcggccggcgggcatgccgaagaaggtcctgccgttgggcggcggtgcggcgccgaagagcgatgacaggccgcccgtgtccgagttggagtcgccgaagttgaacacggccgggaagtggcagtcgccgcccgcgccggcgtcggagggccgcagcgccagcgccagcgccagcgagagcagcagcagcacggctgctctactccccgccgtggcagtcgcggccgtggccatttccctctccctgcgtggctgcgtcgcgtcgcttgtggcggcacggtggggactggggagtgagagtgaggccggggcgcggatgtctgtcgcggactcgcggtgcgcggtggcggtggactgatgtagtagtgggtcgtggcctcgtgggttcggaggcggatggggactggtcagtggatagatagagacatcagatatgggccggcacgcacgcggctccggtgccgtggcccgtggtccgtggcgtggcgcgcgcgcgcgcgagcttggtgggaagacacggcggtgacgtgacggtgcggcgctcgcctttctcggagaagggagaacggtgtgccaccgctaattcctgtagcgtttcctgctgtttgtggagcacgcgcggcacacacctggacgagcatcccaatcccagatagaaagaacacacggtggcgtggccctgctgagctccgcatctacagttaaaccatgatctatctaaacgttctgcagacttacttgcacacgtttgcccctaaattctgtttgcacgcaacagttaatccgtgtttgtttcagcgttctccggcagcgggtcatctttcggccaagtaacgagccgttccgtggttcagccgaacgatatccgaagtccagacggggtaacgtgcggcgtgccaaagacgagggaacggcggaacgcccgccacacgctccccgagctcggcgtcgcccgggccacaatggcggccccatccgcttccgccccgttgctccgctcccacccccaccacggctcgctcttcccctcgtcaccgcgccaccgtcccgcggccgcttctctgtctgggttcccgcccctcagacccgcctcagcccgcaggctcccatacactgcggtgcggtcctcctccaccgcctcaccctcggcaccagtagaagatgctcccgcggccgcggctccgaccggggacgcggaggaggagcgggtggtgctccccaccaacgagtcctccgaacgccttctgcgcatccggcacaccgtactgccgctccccttctccccctatgttacagtgcttgaactggcctaatcgtatgcttaatttggtctcggttctcaccaaagtcccgtcactctaatacctgtacagtttagtgtctcgtcaaaactatagacaccttagtatactgtctttcacaattgttgctgtagtgcgcccatgtgatggccatggctgtccagaagctcttccccaactccaaggtgacaataggtccctggatagagaatggtttctactacgacttcgacatggagcccttgacggataaggacctcaagaaaattaagaaggagatggtgagtctgcattcctgcactgagcatgtgcgaattgacctgaactgcaaagtggctgttttaatattcagggaaaaaaatagtggcggttttgatttgtcaatttggtaatttcaattgtttgataggatcggatcatccgacagaacctcccattggtgagggaggaggtgtcccgagaagaggctcagaagaggattgaagcactcaatgagccttacaagctggagattttggagagcattaaggaagaaccaatcaccatataccacattggttagccttgtaaatcggtgacttggatatctcaaaacaagagagattggtttgtttatgctagcgtgtattgatgatatcctgcgtgtcatgtaggagaagagtggtgggatctctgtgccgggcctcatgtggagtctactggaaaaatagacagaaaggctgttgaacttgagtccgttgctggtgcttactggagaggtgatgagaaaaaccaaatgctacaaagaatatatggaactgcttgggaaaatgaagatcagttgaaggcttacatccactttaaggaggaagccaagcgacgagatcatcggcgattgggccaggaacttgatttgttctctatacaggtgcgtcttacatcttggtttctgagaaagcatgcataattatagactagttatg

SEQ ID NO: 318 - DNA, 1688 bp, Zea mays
  source 1..1688: mol_type = unassigned DNA
ggtgagccagtgtgattacatttgcggcctaactgtggccagtccagttacgctggagtcactagtatttaggtgacactatagaagcggccgcgacaacttgtccaccatatatgattacatcatatggatagtctactcatttatttggtaaacaatatgagtattgtcatgtttttttggcactcatgtagtttccctgatttcctcattataacaatgattctccgtaaagaacagcactttcagttgatgacttacatatgtactgccttcttctcttacgcttgaatacaaaaaagttatatccaaatcagaaaccagattattttcattgtaaatgtcttcctgaaagtgacaatttggtatataaatgttcatgataattataggcttatggtattcgacaactcttttggccgttccaattctagaatgttgttttcgttaggagtaataacaattcatttagagatagcataaacatgaccatggagatcagttcccaaatatcttaagtatcatttttttacaacattcaatttatgatcatggagataggtttatactgataattatacacttatgatcttcgacacctcttttggccattttagttctagaacgttgtttcattaggagtaagaacatttcattcagagatagcacaaacatgaacatggagatgagttcccaaagatctcaagtatcattttataacaactttcaatttatgatcatggagataggtttataattatcttaaagatgacttccatcgctcttttggccattttagttctataatgttattttcattaggagtaagaacatttcattcagagatagcataaacaggaacatggagatgagttcccaaagatctcaaatatcatttttaaacaacattcaatttatgatcatggagaaaggtttatagttatcttaaattgacttccatcgtttctcttgctatcaatatttgttctctgttggcatcataagaattttttgtatggtttcgagatggcagtccaccatgggtcctctatacatctgacatatagtttattttcattcgagctgttgctactactcgatatgggtgctgctacataaagtcacttatacatttctaaaaattgttttaatagcaacaatttctgcggggctacaattatttggctaccaacttatagaggtatggtttctctcttctgtacttcaactacaaagtagtatttagtttcatgaaaaaaacatttataactatactacaaagtagtatttagtttcatgaaaaaaacatttataactatgtactctttttccgtagtttagacatactgccactgtattttctattgttcaacatatttttactgtagcccatcaaacattgtatctttccctgcaacaaatttacttttcacttatttctcagagaatttaatatttttttctctccgacagtactcttgcatggtttgctgatatcaaagatccttacctttttacatttaccgtcgaacgtcgtcaccttgttaaagttagcctagagtctagattttggtagtctcttcctcatatatgcgactgtcacgagtagcaatgctagtcgtggccatgggctcgaggagcccatcgtcgtcgaaaaatttgctattttagcttttttaacgtgggct

SEQ ID NO: 319 - DNA, 878 bp, Zea mays
  source 1..878: mol_type = unassigned DNA
acaagcttgtctactagtttgtgaataggttttaacttgtctatgttatcaactgcaaataacttacacttttaattgtttttacgttgtacttcataattaattgtagaacataatgatgcaaaggctatggagaaggctgctaaaagtagatccgtcaccaagccatgttcaaatgctatttatcatgtttaaagtgtgtgatgcactttgagcctttgtggcatgaatcttcactgatgcactgatggtatttctcatgtttaaagtgcatttacttcagttatgagtttagtcaatgtgttgctgttatgtgtaatgaatctgacacactgtgtattgtgtgcttcactgattattgttgaagccctggaggaagttgtttcttttgcaaatgacttgttatttattgtattgtgcgtgctcatgtgttgtttactgtggccggctgctgcttagcctgcttgtttgctgctgctgtttactgtgctcatgtctggctattgtttaatgtgcagtggccgactggccggctgcggcttgctggtgtgctgtgatgaatctgataggctgctgctggtttataatggccgttgctagcttgcttcaattgttcagtactggtggcatgtagagcagcagctacaatacagtttgtttttttgggtaaaatcgaaagccaaaccgagtttaacggttaaccgaaggacagattttcgattttccaaaccacatttagattgttgttgttttagaatccgaacttttaaaaaataaaactgaaaaactgaatggaacaaattcaattcactgattgcccaatcctactgccccgttcgagccgaatccactagaaaccgtttttatgggtattatag

SEQ ID NO: 320 - DNA, 2147 bp, Zea mays
  source 1..2147: mol_type = unassigned DNA
ttatggagaaatttgataggggctataaaaccggagcggattagagttggtttggtgacaaaaaaatagagaggattcatggtaacaaaatcctattcaaatttgagaaaaatagtaacaagatttctcccattaattcccaccattttccaatttacaaaatcagcccttgctcgccccgccccgccccagctcgctcgcaagtcgcaacgcatgccctctcccgagtcctgcccctaccgacggtaccgtccgcgtccgcccgctccgcctcccaaacattccccccaccccctacgcgcgcgagcctaaaaccctagctccgtgccccgatcctccttcccgcccatggcctccgccgacgccgccaagcccgcgtccccgcccgccgcggatccgcccgccggcgacgccatggatgccgaccccgcgccccccgccggggaggaggccacgccgcagaagcagcagccggagaagaagcggcccggccggaggaagaagggcgaggcggcggccgcggcagacaagaagacgccgccgtccaagaagtcggcgggccccgcgctcgagcgcccgtccagggagaggaagacggtcgagaggtactcggagctcgcgccgcgcgccacgcccgccaagaagtcccccgctattctccaggtcagccagccgttagcgactcctccctctcccgctcgggcatgtcgcgcctgcccctgatctgttgttttcacgcggcttgcgtcccgcctgctgtcccactagcagcttgctaaaagtcgctactttcaaggatgtcctgactcttggaacacgcccttttccatgctagtattgccgtttgtgtttctgactgggaggtttgttcaatttttgtcctttgagctcatcttttcgcccccgcttttgtgctgcagggctccggaacgaagctcaaggacatacccaatggtaagctcgacctcctgaactatgccccactattttcgtatcactagcatgttctccctcttcgctggcatttcattgtgtgataatccctctacgctagtggcagaccattgtgtggtaatcgactgatagttctgtaaaaaaaccgtcttgtggattgtgtagggttactctcccgataaccctgcttttgatgtgtatcatatgatctttcacaccgtagagttttgtagagtgaagctggttctgcctggtaatccgatgtagagttgtgtagtttgacgatggactccctaaatgtgacatccttgtcctacatgttcaccttataaacagaccttctaatcagtggcatccaatttgagcacggcttttaagactttatacctttcttataggtgtctggctcttgtttggagtttggacttatcatttgtgtgtatttaggaatttaaactggtgcatgtggtgttgatacaatgcaaaagaatgaatcaataacttgagatacatttcacaagcttagtcccataggttgtaacggataatgtgctgctgtccagcctgataggttcctaagggcactaattgtgctgagttgacgtatgagagaaaatgacatccatgtcaggttccaaattagtcaattcttgcactgaacttatctatgcgggactggtacccatgtgcaaaaacaaaaaatgtctctgcatgcccacagccgtttcttcccatcgccaaataaaaaacagtccatacttgcttttgcccatctgttttcctcacaagcagaaaccagtggttctccttcccttattttaattgtcacgatttgactcttgaaatgagtcgattcattgtctttttctagtggagttactactccttagctcgtatgtatggtggacagggggctggtgacgatagtttcggcgtcatatggtggtgactggagagaggagggctgggagccaagggagctcgacaacatattgttgccttgcttgcctttctttattctttgcagctacttagagccattgtagcaccattaaatctctactaatataaagtaggagattttctgtgtgtcaccctcccgtgtacctctctgtgcgttacccctccttgctcccctacggcctttaaattgtaaaatgatagaagtaagctaaaattatgcacgagtgtgg

SEQ ID NO: 321 - DNA, 2247 bp, Zea mays
  source 1..2247: mol_type = unassigned DNA
cttgcttttctatttttggaaataaaagcatgaaagtgcaagcagaaaaactatctagtctggccaccccccgcaacgcgcgcgcggccctcctcgtcctcctcctctcgcctctcccagcaggccgggcagacccccggccggccgcctagcttgtcgcccgctccttgtagctcggatcccgcgcgtgcaataatggccggcttcatcaaccgccacatcctcccgccgttccgccggccgccgctgccattcttccgcccgggtggcgcggggtcggcgttgcccgcgggccggcggccatggacgccccgtcgcatcctggacccgggcgacgacgccgtgctccggtggtaccgcctcttcttggtgacctgcctggtgggcctgttcgtggacccgctctacttctacctgctgcacacggatgggctggcggcgtgcgtgtccatggacatgggcatcggcgtgctggtcaccgcggtgcgcaccttcgccgacctcttctacctggcgcacatgatcctcaagttccgcatcgccttcgtggcgcccagctcccgcatcttcgggcgcggcgagctggtgagggaccccgaccagatcgccatccggtacctgaagaacgacttcatcatcgacctggcagccatgctcccgataccgcaggtccctaataactatagctagctagctagtcgatcgattggattgggaattgggattggatatatagcttagctagctgatatgatgcatggtatacctatattgtatgcatgcagatgatcatctggtttgttataccagctgtgagtacatcctcggccaatcacagcaccaacaacacgctctccatgatcgtgctgatccagtacataccaagagtctatctcataatatccttgaactccaagatcgtcaaggcaagtggagtggtgacgagaactgcctgggcgggggcggcgtacaacctgcttctctacacgctggcaagccatgtcctcggtgctctctggtatctgctctccgtcgagcgccagtactcgtgctggaaggaggtgtgcacgagcgagaacggcaccacggcagagatgcctaccaggtgcttgttgagctttctggactgcaagagcagggacaaccccatacgccagacctggcataaccacagcgcgatccagaagcagtgcatgcttccggacgccgaatatgactacggattgtttggcgatgccctcaacctggaccgcaacggggtcggcttcatcgataagtacctctactgcctctggtggggatttcggaacttgagttcctacggccagaacttgcagaacagcacctacaagggcgagaccgtcttctgcatcctcatctgcatcatgggcctcgtcttcttctcccacctcatcggcaacatgcagacctacctgcagtccatgacggtgaggctggaggagtggcgcgtcaagcgccgggacatcgaggagtggatgcgccaccgccagctgccgccggagctccaggagcgcgtgcgccgcttcttccagtacaagtggctcgccacgcgcggcgtcgacgaggagtccatcctccagtccctgccgctcgacctccgccgcgagatccagcgccacctctgcctggccctggtccgccgcgtgcccttcttctcgcagatggacgagcagctgctggacgccatctgcgagcgcctcgtctcctcgctcagcaccaaggacgcctacatcgtccgggagggcgaccccgtcagcgacatgctcttcatcatccgcggcgagctggagagctccaccacggacggcggccgcaccaacttcttcagctccatcacgctgcgcccgggggacttctgcggcgaggagctcctcacctgggcgctcatgcccaaccccagcctcaacttcccgcagtccacgcgcacggtgcgcaccgtcacggaggtggaggccttcgcgctccgcgccgaggacctcaagtacgtggccaaccagttcaagcgcctgcacagcaagcgcctgcagcacgcgttccgctactactcgcaccagtggcgcagctggggcgcctgcttcgtgcagggtgcctggcgccgccacaagaagcgcaagctcgccaaggagctcatgaagcaggagggcatctgctacgacgaccaaggcggcgccgcggcggacggccacgggacggacaccgatggagacagtacgccgctgctcggct

SEQ ID NO: 322 - DNA, 632 bp, Zea mays
  source 1..632: mol_type = unassigned DNA
tcaatcaaagttccgagaatcaaagttccaaagccaggcatgagctcatctctagagaacacacctgctgtgaattgccactcaggcctcatatccccaaccattacccctactcacacctattgtatctagataaagctgtacttgtttgactacgtcaggaattctgagttacactccgcaacatttatcatgatcagacttttttcatatttcctacttgagcttgttgccttttggaatgcttctgtatgttgatatgcgcccgagtttgagcatctgctggatgcggtcggcatgcatgctgttcgttttgttctgcgtattgctctttgttcaactcctatttcctacataactagcacactcctatttcctacatattttccccttatttatacatgttgcctccaggtatatgtttttcggttcctccagttatgtacatgttgcctcctctggtagatgtttcctcggagttccctacatgtttcctcaattcctcctgtataatgtttgccctttttttgtatatgttgcctcctggtgcatgtttcatccatgcttcctccgctttattcatgttgcctccattataatacctcagttattataatatgcccactccgtta

SEQ ID NO: 323 - DNA, 1274 bp, Zea mays
  source 1..1274: mol_type = unassigned DNA
gtctaataccttagttattcctgtggacgcactcagttattctctggtttcttcccttcgcgtcctctcccgccgccgccgccgttgaccagatgggtcgcgtcatacgcgcccagcgtaaggaagccggctccgttttcaagtctcaggaggactggtcgtctcagcgaacaggctgcctcagccgcagcaaagtccgacaaggccacttagacaacttttgcggttgtttcaattacattagttgatagtcttctttgtgataaaacagttaaagctaaatatcaaaatcatatcaaagaagctgtagatttctgaaattttgattaattttctttttagcaacatctgcaggcactctgtttccaaatatgccgagcatgacaaggagctgcaaacccggtgcagcccacaactgaaaatccaacaagttcttggcctgctctgagaaggttctcccaagtccatcttcaaaagcttcagcagatgaacaatatgtcaaaatgtacgaagtgctgaaaatagtatctgaaaagtttcctctgagacagaaaaataaaggtggtgctagtcaacagaccaatgaaggtggtgctggtcaacagaccaatgaagtacctgctggacaacagaccaatgaaggtggtgctggtcaacggaacgatgaagtacctgctagtgttaagagaacctatttcaccgtgactaacattgtaaagttggctcaacattcggataacgaggagatctccatgcacatggacacagatatgctcgtcagacattttttcagtgtggtcttaaataacctgctactgccacaaaagtctatttttatgtaacctcacctgaacttcaagctgtatatgacctagaaaagttgaaaaaggttgactggtcatatgtgatatttcattcattaaagaaagctcttgcactgactttaagaagaatccggggcatatgaatggatgtgtccttatgtttctagtaagtaccaggataatgcagagcatatccataattccttaaagtaattgtttttctcatgttgggtaggaaagtgactaagtgaagaatcgttggttcacaggttgttttcatggactgtattcaaaggaacagcttggacacaatgttgcagaattaacctgtatacggaggcaatggtcgataaccttttgagtgcaaaaccaattaagaaaatcagtaagaggacaaaaagggtacgaaaaggaacctttaagacattttgactgcatctgattgttgca

SEQ ID NO: 324 - DNA, 979 bp, Zea mays
  source 1..979: mol_type = unassigned DNA
tgtccctttcagctggctgcggaggaaaaggaaagggcagcagaggcacagaagaaagtgatgttgctggaggatgttgatgtaagtactattctattattgttctatgaggtgatgcggaagtgtagtccaaagaaactgactgcacccccttgatgtcctttttagttgattagctgggaagatagctgcttcagacaatttgcagtgctgcatgagaagtcttcttgtaagaggtaaaactagaataattgttaattttttaacctctattgcaaatttacctaacctctgtttcaacttttttagcatcttgacataaatgatgcagatagcatatacaagaagcatattttagaaagatcccacaacagaattgttttagactttccttcctgtgaagtacgggaatctacttttattaattgtttgcaaccatgtggtcatatgcattcccttgtatttcatttggtatgcgaactatggtcagtggggtggcatgataaaattattcttagtgaaggtgctgtggtaagtacttttacctatgattgtcatctcaaacttagttattgttattctttaactatggttgttgtatctttgattgttattccagaatgatttgttgaataaagacataataactgctaaaagtctgaacagggagcttactccaaataaagtgaggtatgtgaatcaggtttgtgctctttgtatttcaatgttactgggaaagctctgtatttctcaatgctctgtatgtctaattgttttttccccagatttttgttcctatagtttataatcatcattggtcgctagttgttgtttctactgtgcaaagaaagatatatgtccgactcttgtcgaggcatatataaagaggtgccaattacgttgcttgaaaaactgcagacgtttttgcaacgtaatcacatggacatatctggttatgatacgtggacaagttgtcgcg

SEQ ID NO: 325 - DNA, 1296 bp, Zea mays
  source 1..1296: mol_type = unassigned DNA
agcctaggacagctcggccggaatgcagagcacatagaaatcctcgtgcagtccgagcactccaagaattctccagattgagtgtaacaagagagcacactgcataactgttaacacctctctgaatgtaaaactatatatccattcgattctgatcactgtacattcctattcagcacccatcctttttccgtgtcagcgtcgttgctgcatcagtgtggtgtggcactggcaacctctgacaaagaacagcaggtggctggcggaagatgcgcacccaacacccatgcatgacgcatcattgaaaacaatctgtccgttactgctcaccacaccagtacgcattctggcacacatcgccacgcaaagaatcttccatattctgcaaccttatctctggcgatgttgaggtggggtgtcgatcatgtcgatcattcaggcagccgaccgacggttagaagtccactccaatccattcaaccagtgaccaaaacccaaacaccaccagcaccgccaggccccgtgtgcccccatcactgatcggtgatcgccccgccctcctccactcagtggctcactcagtcctcacgtcccgggtcatgtccatgcttgccgttgccgatccaacgccggctgcaggggtgtctgccgtgccgggatggcgcacctgaaaccagcatgcccggcgttcggcatccgtgtctgtgcaacgctctcggttgttcggatccccagctcccaactgtccgtcgcgctggtcagctggtgcgctcctgccgctgccgcctgatccgtccacccgccgtccgtccgtccaaaaagctcgtgctggcctgggctggctgtattcactgcgtgccagccagggtgcaccgccgccgtagtagcattgaccctgacagcttaggaatgacaccagtaggcgacagctgcgcaggagcaggcggatgttcctgttgtttggtagcgccgccgtagtagcattgtagggccgttgtttggtagcgcccgcgtcaataatttaaatgatgatctcgcatgcgtaatcaattggcggtcggggacagagttagcgaaacccttgctgatgaaattttgaaactcccacgcaagttgaactgtgtacgcacttgtttattttattggaaatgtcgtttcgaaataaagcatttgccaaggttgttgaatagtacagaactcattcagttattgtttggttcttttataacgcgacgaataactaataacattaaatcatgcttatttaattttaactataattagatatcatgataa

SEQ ID NO: 326 - DNA, 4201 bp, Zea mays
  source 1..4201: mol_type = unassigned DNA
caaagaggacgtagggtattacacatttgcagctcgaacctctataaatctcatgtgtgtggtatctaggcaacacccaggatcagcaagcatccagcctgctgccctctctctatccttctctctcttggatacctacggtatcgtggtgtcgttacccgacgacaacatcttagttcaatggtccatgtccagttcaaatatacatacagtaaaacaacctcgcatccaaataatgataattaaactaacgcagtctttaaatgtgccttgcatgctcatcttgcaaaatccttgagcatctatatagtaacggaaggggtgcaaatacggaacaagaaatttgtattgtaggcaacttacttgcattttatcttgattttcatccaatgccgcagacagagcctcagcagaagcaacacgaacattgtaatttttatgggaaagtgcattgaaaatatcagagtaatcggtgatgacatcaaaaccaaagcggtcccataactcctctgctaattcagcaaccacctagagaaggtacatgagccaaagaacaagaaaataaatataatttcttgctctagaaagaaaaaagttcaacatatttcactaacataaaaaaaagatcaatagttccaagttcaaagggatgttacaaaccttctcaggatcatgagcagcaatccaaaggctcgttgacacatgcaaatctcgttgcacagagtgcacaggaacacattttatagcagttaagcaggcaagcctaacgtgcacttcttttgcatatacaccaataaaagcctgaagaaagaaagaggtaagaatacatagcactagatgaaataaaatagaacaaaataagctgaagaacagaatacaaaataacaacctgcgctaactcatggcttcttagacctaggcatagctcattcagcataggcccaactgaaggatgataagcaggaacagtgcttagcacatgataaagaacctagccatagaaaaattaagatagtaaattctagaactaggagtctatgagaacaaaacaaggaacatcattaagtctgaaagaactaagaatgtttaactgataacatcctaggacgaggaagtggtagtattggatccatatgcaaagatagtacgtggagcacatcatcatgaagacacgtcttttttgaagatagaaggatcctttccatgatctgaaccaaatggtagcagcataaataaataaataaaaggacaaaaacaggttaaagtaaatgttggaagggaaatatcaaaaggaatagaaagtgaatttatggttggactaaagacagtggacaccataccggaaagacaaaagtaaacgaatctgctggaagaggacctgctttgcacgcaatagtcagaccatttactatttgttcaaagaggccagatgatggcttcttgctatcatcttccatgatcacaggggtaagatccaaaacgatttcaagatcaccaacagatatcacacgaattgcagcagcaatctcgggtgcccaattgcaaagaggaggggctgtgcaacgagctagcctcaacaatgtacaaaatgcagcatcgcttactattgcagaacttagcaaaggttcaacataatttacctgcatagcacaacatcaaattctgagccacaacagatatgataaatataaatgtagaaaatgcatcactactaatagcagtgtctcatgccaaaaaatgataacaagaggatataagaacctaaaaggtttctccaagatatgttccatttcactgataaccaaatacaaatttcactattttttgactggatatatgagggtcaattattacatacttgattatcatgatttggctgttcgtaaaagatactggtgcggaaacaaaataacatattggtgcatttattaagacataaatcataaacatttccaaaaacaaaaaaatgtaaacctcgctgcagacacaaaagaaaaggtcattttttgttcaaattaattcttatcgattattcgatttttttgggtagctttctaggtttaaaaaacgatcttaattaaacaagatatagccaatgtgttcaatatttactcctagatgtgcacattactccctctatctaacacccttcaatgttgtgatgaagttctgccaagcatggtctatgggctggcaacatagtaacagctaacagtaaaaactgaaagaaactacagagggaaggaaaagattgctaaccagagatggcagttgaccatgagtaaatataggattagcaatagccaattcgccaagagcatccaacattaaggagagattcttctgcacttgcccaaccttcatacgtacagatgcttcctccttcaagagcaactctctggcctcctctttagcagtcttagccttgtctataggagctggaaatattagaaaataaattttcaccaagcaacacactatgcacctattgtcagggctaagaggtcgaagtaccagtcttctttgtagatttcccagcttctcgcttgccagtgcctgaagattctctcttctcattctttgcaggaacaacagaccgagctgtctcctacaaattatagcaacaacaaaatttggcatatacaatagattaaagccatattcactggctatcaaataataatactagattgcacatttggtagattttctttctggcaaagacttagaagctacaagttcatcacaaactacaatcaaaatatttaaaaaaaacaacttgcaagaacaaaatattactgcatcttgatcatcatatgcacggaaacgcccctttgcaagtttagagtttttggaagcaacagtctcagcaatgtaaactccttgctcggttgacaactgcccctctggagtatagaatatctacattggaattagaagaatttgtaagaatatatgctaaaaaactctagctaattatgaggctagtgatagaatgcacaaaagtaaaaaatagtagaccttaattgcacacaagctaacaaccttgcataaaaactataaaccttgtctgtatgtcagcatttaagccactccagaaatcatggaatgcaagagctttagtaccaactagtatctcaaaatattctaatgcacaaattatgcagtgagacaattggtatgccatattcgagaaaaaaatggaggattggtatggccattgtctgcatcaaattgtgagagtttgtagaacaaaagaagcaacacaaaccatctgtgagagcagaaccaaaaaaaagaactttcatgtataaacaaaaaaatgaaaaatagcactagaactataccggtaatgtagacatcaaatagagtttgagtttgtgcgaaaaaatagtttgagtaatttggaccattatgacctgaatttatggaatagcctaacgaaaagacttctaagaattttatttatttcattcagccaaatttcaaagaagtcgtcaaagcccaccttaatatcagtctcagaaaaggaatcatgcaaggtgtgctcctggagtcctatgaagtgctggaaaaataaaaatatcaataaaatgtcagggaaagatattagaacttccatttgggataactaagtgataagataaccttctcaaactctagaaatgtttcattaggagtaattgtcataaatgtcgacagcgaacgtaatgctgcactctgtacttgcttgttggaactaaatagaccgtcctgtgaaattaattcctgaacaacaaatatactggttaagtggttattgacttggatggtatgtaacaacaatactaaaaagtggcacaaataaagaatgtgacagaacagaatttccataaaaggcaatgtatagtagcgttcaaaatatattttaaaaatgaaaaggtctaaattactcccgataaatatggccaatgtccagatggccccactaaactagtgtttgcatcaatttactctcccaactatttaagttggtccaataccccttaacaaaatttgtcattttttgtttcttcgcatacaatttgagccttaatttcaaaatttgttagatgatagcaaacattatattttatgttaaaaaatactaacctttcattattaagtttgtataattttgtaaatcagagtgtttatctatcattaaatgtcctggcctatc

SEQ ID NO: 327 - DNA, 1526 bp, Zea mays
  source 1..1526: mol_type = unassigned DNA
ttcaacgccagccaaggcctcggatgccacagagccgtcatccaagaagaagctcgtgctattcgggcgcgcgtgccgccccgacgacgaggctcgcgtcccagagaccctcgccgcgccctgctgcgccggcggcggcgagcaatctagcaagggcgccgcccaagtgaagaacgccgggcatcaatccatcaatgacgcgctggggcacaaggccaagactttagatgagatgcgcgaattgtatcctcacctcgtcgatgagtcgatggcccttcttgacccggcggtgctggagagggtgctaccccgcattgatgacaacgaggcccaggcgttggacaagaagatcaagagggcgaggaggcagctcaccaaggccatcagggaatcggtgagcaaacccttcttatccttaatcaaacttacttgggagtacgatttccctttaattactctcaactcaaggttccggccttccgtgtctttgttttaattttcttgtgattgtggttgtgcttctaatgaataaattattggactaggttgtttcaaagtatttaaccattggtgaaaagagtttggatattatgcccacatcatttagctattagacatggttccactttatgctgaaaatatagtgacaagggcatagggatggggtccaaatgaataaactacacgaaagttaaagtggtcctgccgctacttaataattactatacatgcttatgctgatttcaagatccatggtatttgtttaacaattgcattcatagataggcatcttttgttgtctggttcccagatgtaggctacctcaaagtattttactgcgattgatgccatttgatagtgaagagggcatagccaatctttgcgtacatttgtgaccattacctaaaagcattttgcgtggacattgcaaatatggagtgcatcactacagtcaaatggtgccccttatctgatgtcctcaattttcaaggcactgattgccccactttagtacagccagtgtaccgtacaacgctttgcctataaataggaaatatggttgcaagcaactcaaggtttcactttcagcatactgttccagaatccaaaacaatgatgtctatttgggaatgaaactaacagaactgcgacttaagtatactaatataaacttcattgtttgaagcaccatactctggaaaaaatggaatttgtgacatcaaactctgcaaataaaatgatttttttcaataggtagtcatcatccctttgccttggaaactgctatgtgtaccagacttttttttctgcccttctagtttgcacttgctctgaaatattttttataagctgaaagatgcattttacatttgtgtcaaattaccccaccaatcacaagaggatgatgttcaggctgcatcctgtctgacttctaaacttcgggtgctaatatatcttttatcatcactagtgaaaccacatgttgccaaaataacactagtctataaactcgacctgcaggggga

SEQ ID NO: 328 - DNA, 1456 bp, Zea mays
  source 1..1456: mol_type = unassigned DNA
gctccattctagaaacgactttgtccaaaagaatttagaaagccaaatggtttactatttaaatataattttctttttttaagtcactctgtactataaaaaattaattcaaacaacaataaattagaaatagacgatttatcacaccgtacttcggaaccaaacagcaactaaaaaaccggccggtaaagtttcacctgtcgaaaaatgtaagaaccatcggccatttaataaagaggccgatcagccatactattcgagaattatttaaacattcggctattcccatattctacaacatttagtgggtgatatcatcagctgttgattatttatttattcccgatgtactgtagtctgtagaccattatttttgccccgatggtctaggttatgtttagtgattgtacatttgtgccactgtttaataggagtagtactgtacatggcaagaagtcaagaactgtgtcgatggaactatgcaatggctcctgcagcagtagcagtagctagtataaatgtgcggcaggtacgcttgtcgtccaccatctcagctgatgaattgatgatgacgatgggggacaagaaagacaacgcacgttgtgaagagttatgaattcctatccagtccaccagacgcagtaagactgtatttgatggatggcataaaatatagatattacaatgttgataacactgtttgtaaagttaaatttaaaatagagataagatataggatgagataatctaaaatgttatagtgatgtcgtaaggattttgtcgttgttcgctaagctataactatgtagtcttacatttattttgaactttgtaaacagcgtaatatataatacgattcattattttacactatgtggacaacctgcttcagttgtgctttctttttctctcaccaaaacacctccatagtctgccattgaattcaataatgttgttgagacgtgttatgagttagaatggtgccactataggctataggcctctatttagaacagtagttctagttataatttacatataactaatcttaaataaatacggtttcaaatttcacttaagcgtggtttcaaattttagagctaaccttcgatatatctaagaatatcttaccacctatttaacctttgatatatctaagaatatcttaccacacattttgtctaagaaaatttagctacactttgtcattttataacatgtacagtctaaaggaattttatttaaatttagtataaccaaacacgtgtaaacttgatcaaatttatatataaaaaaacaaaacatgaccagcaaacaaatacttaaggtctcgctccttggctcaacccgtagagcccgtgaattgaggtcaagaaaagctaaatattttttggtagagctcttccaatttctaattttttttgtctgaaataattttctatggttttctaggata

SEQ ID NO: 329 - DNA, 3755 bp, Zea mays
  source 1..3755: mol_type = unassigned DNA
ggggtacacagtaagctggacgcgcgaccgacgtgtatgtacttgctcctatgtaaagctaaggctgcccccgcgcgcgcgcacaggcacagtgcgcaagctagctagcacgtactatagtagagttcttcgtgcgaactctacgcttgacatgagatcccggcctctcactcgcgggcgccgcacgtggcggcatgcattgcatgggcacagtctcggctatagctagctagcccctatgaatggacgcacgagatctgtgtggtacgtgctctacgtatagctaggaagcaggtcaggacgactgagtgaggagtagctcctcgtagctggcggctggcgcctactccggccaggggtattccccggccccgtggtacgtagtggtaccgcggcattatcgcgctgtctctcgcggggcaggcaggacgccccccgcccgtgtcacgtccgcgtcgacggacgcagccgagagcggctggttggttggcctcgtgggcgcgcgcgccgacggcggcgtcgtttcggccgctgattggctccggcctccggtccgccggggacggacggacgctccatcgatcgctgcagctcgctctgctgctcagagttggtgcacccgtacgtacgtgcgcaggctgaggggtgcgtggaggcgtccgtgtctcgtcagccaggcacgcagcaccagcgacccatcacatgcgctgatgcattgcacacacactactacagcggtgcgctcccaagtaccctctccctgtacgtgcgacatgacattcctgttaccgccttcggcagctgcaagctctgctagctacacattcctgttacaaccatcttctgctacatgttacggatcgacgcaagaagaggatggggccccgcccagccttgttggttccatgccgacacgggagcaacttcttccatcgggtattgttagaccacacgtacgctagcttgctgagaacggccaggccacagtcgtctgatggatggtacttgaatttcttgagaaagagaaggtaccgtacacgtgcaaataaatgtcaaacatgaaaactgtaaatattaacacggcatcaggctacatgaacactcttttttctctcccatgcagacaacatgatcctggcaaaccatcatctacgcgttgtgtcagagaggcagaaagaggagcctcaacattaccacacgtttgtcgggatgcaaatgaccttcggtgagtgcacaataaaaccgaaacaggttaatctctctcagggccatatgttggtccatttctgcaagcgaatgatttttcatcctcttgccatatatatgaatcatggtccagcatatgcacaatcattttactgtttgcaagtcatatggcaaaactcacacaggtcacgacaagggaggttttacccgctacatgtatgtgcatgcacagtcaagttttcattctggctcttccggggccacaaagtgaacaatggacttggattcagatcacaagctgctgccagccttcatgtgcgtttcgattatgacatcaatgtgtctagccgaaaacagaccagaacaccaaaccaaattatttagcaaccccacaagagagccttccattttttttttttgggtgggtgggtgggggcaaggtttcatggatgataaggagaaaaacaggaaccctattgacgaggcatcatcctttgaatcttgttatcacaaaccccagagagagaggatcggatgcatgttaagataagccactttaacccccactccaagagaagaattcctcccttagtccattctaccttgttggacctctccactccacttgcacatcttttctccccacactgccgccaggatttctgcccagcctgtatcaatatagaaaggctttagaaatgtttacaatttacaagaacggcataaagtaggaacacaaaagttccgctgggggtggggtgggggtaggacagcaatggtgaatgcagaataaaaaggcagaaactgcagggtaatgtgggtacacacgacaactaaatcaatttgcaaatatattgcagaataaaagaactccttgaaaaggcaacgtgacaacagaatatgttccaatggtgaatgcatctgccgggactaatgtagcaagtttgcttggtgtgggcatatgtgtgtcatgctcctcactgttgtgccccactaccagctggacatggtgctcctaaaatctggctatgtgtgaccaccgttcacctagttgatcagatagctggcatcttgtgatgggcacacaggggctcacctcctttccattctatcagtcaaggctacatgcttttatcaatgatatgtgaagaaaatgcaatcaactacagttggcttagaagccataagatttgcttccttcctagatcttctttacctgaaataaaatttctaaagtcttcctgtcaatatcttgcatcaacagcaaagagatgatgtgcaggtcaaaaacttcttttttatgcagagatagtttcagcagtttgttctatcaatttagattgtgatgagcttgtaaggtaccagtattgtatgattattcctaaaagatgaacatagtagaaacgacacaatggtatttgcttgataaaattttgagaacatttaattcactgtggcatggcattgaaagcaatcaggtgtgttcagaaccttatactggctcctaatgcaggaatttattccagataatgatgggtgtgcatttaaaaggaaaatgccaaaaattaaagtcctcgaaaaagaagaggtatctgtctctatctgccatgatgatcagcatttgccatatccacatctcggctgtcagccacttgagcaattcatccaaacatcaacagcaggaacaatcatcagcacaccacaccaaactgaaccctggagaatacatttggaactgtgattgctattatgccgtatgatgaaatcaagtatgaccttgaagtatacaaagtgcaattcaacattaacaagtacagacgactacaagtttatgctgaagtgcaagtcaaagccttacaagaaatataccttcgagaaacatcctctctgtctaccccaatctccttttgatgacatctaaggggttttctcagacattaataatgggctgaagcaaatgcatccaaagactggaactatatgcaagttgaatataaatgatcaataacaatgtttgataaaaaaaattacatggaaggccccacaaacaactcagcaagaacaaagcatcaattatcagttcgcttttcatgacaagcataaaaggtaattacagttacagggaactctttatgccaagtacgacaaaggacacagcaaaagtacctagctaactaggcacgcaaaggacatgtagcagagatgaaccgaagtgttaccaattgactaaacatttaaattatttacaccaaatagcagctccgcaacagcagcatgcaaatggtgagcagtagcatatgatctttcagcagtttgatcccatcctagcaatgtaggagttggtgaccctaataattgccggttaccaccaagcacaatgaaaagctgcaaacctgctgctccagaaaaggctggcaaaatcactaggttcatataattgatcacagtacacctcactgaggcagaacactaggccatttctctatcagtcaaactaacaatctgctactctgttccaaattatagttcactttatcttttcgaagtta

SEQ ID NO: 330 - DNA, 2752 bp, Zea mays
  source 1..2752: mol_type = unassigned DNA
tagagcggggcgtgacgggagcgtgggtgagagagaacacgtaggggatgcctttgaggcccagcaagatgttttccttgcttccttcatctagttacatggctcctatatttatattccctaaaggaattagttcccgagcaaactaaaaaatgaatccttatagatttggactctcctttcctaacaagaaaaccttatagattggactctcatttcctgacaaactaattctatttcctaaatgggtactattcacattgagcgtagtttgcgggcccaacacctgtgtggcccattttctggcaacataggagataacggtcataacaagctaccacacaaataaatcaggtaaaaaactattattgcagatttaagactcatgccgtatgtcgaaaaagctacctacaatgcacaaagaaacacaatgaatcaaaacatctgtgaaaacatatttgccaaattccttgtgtccacattacacttacataggaaaatgtggagcttcctggaacatcttgccaacattggagtattttttcttttcatcatatgcaattcctttgcccaacccataaccaaagccaattcccacaccacatccagctccaactccaaagcctaatgtgagtccaggaaatccatagcctaaccctgcacctaaagtaatcatggagaaaaatataagtgtgcagacatatagtattcatgatgaaaaacaaattattctcaacatcttttctatacaaagtgtaagataatagcgcaggcacatgaccattaagtcctgtaactcctagtatcaacaatctagaaacatattaagttttgaaaaaaaatgtgcatattatataggctctaatgttaggtgtgaccgtgtgagcaacaagaaccagttgatatgtaaaaatcattttatacatttatgtctctggagtctggagttcatgattcttcataccatattttatctttcagacataaatcctgtgcttaagccaagtgcccaagtgcgcatttcagctcctcaaagttcaactacaggtctacagcaaagtcattgtatccttcagtcttctatatatttagatgtacactcacctggtgccatgtggggaattcctatgtatagtttatgccacagtgtacacatacaatcactgcctcagttcctaccctgggccttccatcccctcaaatataaaacaggatctttcatatatttagttggttaaagtggacatcagatccgtctgacactgtatcatatttttttttaaaatctgaagtggcaggtactaattcatccactcattttttttcagaatgctaacaatatcaacaatcactatgccactggcattaggcattgatatttttttgctgacaaccatgcacatgtataacttggtaataatgtatttcaattcaaaaatgatgttgtaagaacatatatgcttaggagtacatagtttctgaatacgcataacacagaaaaataagaaagtagtaaacccgaactccaggagttatacattttttttttgtttcgaggtgacacaacatttagtccacaaataatcagcaaataaccacagcttgtttgggaagaataactatcctaacatcattaaggattaagcagtgaaacacacattgtctcggatattcaataattattctatgagcaccatccagcgtcacccggactgccagctagtgcctaagtttttcagaacgctgcctataatgtgaaaaaattggagccaccagttggcaaaaacataaattgttaagcataatgccttgactgtcaagttcccaacctaggatgagacattttaacggaactagtgaatgttacaagaaaattgtgaaatatcttctgataagattcctgatttaggactgtgaatcttgtacaattgcaacaatctgtaatcgataaaccctccggtaaacctatgtcctgcaaggctgatactagaacacctgtaatttaatctactaataaaccaattgaagaaacaaaaataagaatcgctaccgatgcagaaaatgataaaatctctcaggaataaattaagcaatgccagatcagcagaccctgaaacaaatctgtttgaacaacttttaattgggaaaaccatatgcacgctaaccccccctaagaagacagattgtagaatagccaacaaaaggaactgtaagtaaagtacacaccaacctattgaagctcaatctcatttacggtaccctaatggactgaatcaatcgaggcgtgaaaagaagagagcaaagcggacggttcttttagacaagaactgaccagaaaccaacaaatgctaccatttcgaggaagagagtgagaagaaggccagggattttaccaccgaagaatccgatgcctgcgccggcgccgcagccgatgccgattccgagggcggggcctatcttgccgagctccttagaggtgacctccggcagcctccagaggaggaccttctggtctcctccgcctcctccctgtttcttagtccccatcggaatcttctccccttcccagttctgcttccgcctcggctcttccaaggctttctgttccggttttgctgtgtgtttcgtgtcgaactggctactggcaggaccggtctatcgtagccggtttgtttggatttactagagctagctagtagttagtgtctaaaattaagtaaagatattcaaacattctagctaatagtttagc

SEQ ID NO: 331 - DNA, 28132 bp, Zea mays
  source 1..28132: mol_type = unassigned DNA
actgtggtgagtttcggggagtttcggggagactcgttgagtctcgcctgaactcgcgggagtttcggggagtttcggggagttttggtgagcgcaaacagggcagcgtggagtccaccgcttgtctgttttttgatggtcgcccaaccgtttgacgtggaggtatttcttcccatcgccaatgtcaatgcgcgatattcgatccagttcaataagttcctggagtggtacgccgacgtcaatgttgtccatcgggaagatgttgatcttcaatctcacgatgtcatcgtccacatgaccggcatcgcagagcgtgaagttccacattccgatatagagcagccgggcatctcgcgacagtctgacgatgtttccgtctgaccaaaactcaggtttgatggtgcggatgcgaggcactacttcaccgcccggcgaatcaagccacgcacggcagcttcggttatcccgtaagcctccgcgatttcttgatttgttaggccgtgttccttggcgatccgtgcatagtatccacggtggatgttgtgcttctgatactcgtcattggcgagcgcgagaaacgtcctcgcgatttctttgcggccttccaagccgtctgtgggtacactcattagtgccactccttgtcagtggtaggccccgggtttcagtgttggtagcactgccggggccgttttatttaccactactagtatatcgaacctatgtgcgattttgttgcgctgtgggtgattgttcattagaatttcgtttttcattctttgggtcacgtcagcagcctcactagatcacccagcgtcatggtcacgtactgatcttcggcggcaccttttccgcgccgcttgtggatcaccatgcccacttgagcgtcgtcgtttaggcgctctacctcggcctcagagacccagattccaagctccaagcggtttgtgtttttgcactcgacgacgatgcgcttacccgcatatcgccagcctgaaatatcaccacgatcgttagcgccactctttgcgcgccgttcgatccggtcgtctatgactgccgcgagatgcttcacaatgagcgtttcaaagctcgttccagcggctcttgctgatgctctacttcgagtcacgattcctccatttgcagtagtcgagttcggcctcttggcgcgtgcctcgaagtggtgcgccgtcgtatttcgcggcgaacttgtacggcttcacaaagtaggatccggcaactcgtgcgctcgtggtcgttgggtgcggcttattgcaatacgggcatatggtgatcacgccgcccaccccacaacgctaggaatcccacggcggcgacgatccaagacatatgcccttagtccctcgttgcgccttagaacgtcatcaggcaacttcgcggggatcttgacattggatgcttcgagcggcttcaagaacaccttttcgcggcctgtcatgacgcgccgaaagcaggttgcgcaagatgctcgcccgtccggcgtgatcccgtggtaaacgacagtgtccggcgcttccttggctgatactccagtgcgacgcatgggacgttcgcagaccttgcagtgactcggtgttgttcttggcttaggcattacttttcttcctctcgaaaattcaaaatgttgtcgtgtggcactttgcatttgcgccgccacatccactcgccgcacgttccgcagcgggctacttcagcatctgcgtagtagagacggtcacgttgcttgcgcgctcgccaatcctcgacggcgctggttttcgtccactcagtcgcagtcatggccgtcatctgcccactcgaaacttggcggctcaataaatacgggcatcgcgtctaccggtggacgatggcacgcgcatttgtaatccttgtagcatccgtgcgcaccctcgcagcagtagtgatcgcataggaatgggctgtggtatgtggcctcaactttgttgctcatgacttcctttcaggcataaaaaaagaccctgtgcgggtcagtggttgatttgatcgcgcagcttccggttctccgtggcgtaccgtgcgcgcaatacctgtaggagcagaatgtactccttggccttcttgagtttcgcggtcaggtcgtcaacttcagcctcccattggtcattggtttgcgggtccgtgtcagtgccagcgagtagcattccgatagcttgtgacattcgctgcttaccctcggttacgccaagttggaagtcgctatgatcgagcggcttttccgcatttacctcttcgacgatccgcgccacttcatccataaattcggtgcgatatttgctcacgtttcctcttcctttccatatcccgatcagcgcgtgcggatgctttatcccccgtaggatcagggtgcgtccgtcgcgctttatggtcgttttcttcgctggtgtggtgttcgcatcgtcgcccgtggtagcagacgccgagaccgttacgacagcactcgccgtcgcaagtcactctggatcctcgacgtcaacgcgtagggtcctcatggtgcccgtgatggattcgctaagttgccgcaacccatatgagtccgtcgcgtgcgagacgcgctgtatgcgccagtaccgctcgatggcatcacgtgcatccctgagcgctcggtatacgtccagattcgcgtctggcacatggcctttagtcgtcaccggtaaagctccagcgcttctcgatgcggcccgtcgtgatgaagtcgccgctcacgggataagcgatcccaccgcgtgcgtacatgtaattcagttcttcgcacgtcacttcatcgacccacagtgcgaggtgtgcatcttcgtcaatctcattcaaagcatgtcctctcaggtacgccaatggcgcgcccgtcatgagcgcgccacggcataaaaaaagcgccacaaggcgcgggggttgttttgcgggatacaaggctctgtacgtgtttatgtacaggtttagaacggcggcccatcggatccatgcatgccggcgccaacaacttcccagccggttgattcggcgtgggattgattcgtccacgcgtcattcgcgggctgttgctgcgagcgttgaccaccgccttgctgagcgcgagtcaccttcgccgaagcgaaacgaagcgatgggccaatctcttcgacctccagctccatgacggtgcggcgttcgccctccttggtctcgtatgtgcgggacttcaagcggccttgagcgatcacgcgcatacccttggtgagggtttcggcaacgttctccgcagattcgcgccacactgaagcgcggaggaatagcgcttcgccgtccttccattcgttggactggcgatcaaacgtccgtggcgtcgatgcgatcgtaaagttcgcgacggcggcaccggacggggtgaatcgtagttcgggatcggaggttagatttccgataatggtaatgatggtttcgttcgccatttactgctcctctttcattgcgtcgtatgcggcatctgctaggtcccagatgtccgtttctcggatttcgtctgcacttgtatcttctaggtgatacttttcaagtcgtgcgaggtttgggaagttcactcttcctccttgcgccgcgcaacctcggcctcgataagctcgcgagcttcggggttggtctgccagatgttgcggagctcttcggcgttcttcgttggaatcactgccgcccaatcaatcgtctgcgcaaccaggagcggcttcacggtgaacggtttacgcttgccacgagttgccgtgagtgaaacagtcacaggcttatcaatgtgcgacatgtgactaatctcgatgccgcccaccgtctcgccgccgaacttgatgtttgggttgcgaaacagtgtgagagacttgcccacccagttatctgattgcgtgccccagatttcagcgagcacgcggcgcattgacttgctaggtcggtatgcgcgctttggatcctcgatgatatgcacgttgaccggctgctctggtgaaccttggctcacctttgctacggtcacagtgcgcggacctgcaaccaggtcatcggcattaatttggtcgcttttcgggatgatgctgctcgaaatatccattagaactcaatctccatttctgcccaatggtctatgtattcggtaggcggtgcgcccttggtcgcatcctggaactcgtgaatgcacgcgaggatgtgaccctcagcgtcatctaccgcgtcagtgattgcctcgaaccaagctggatccgggtagacgcgcttcacgtacagcggcattccaccgcagtagctggtgtagtcaatccacttgcggccagtcacgagtaggccggtcataagttgcgccatgttctcagcgggcacctcgtcgcgaatgacggtttgtagttgaatcttcggctcgcgtgacttgatttcaatcaggccatcatcgccaactagtccgtctggcgagtatccaagcttgaagtttccgaagtcgcgcaccatgaagccaacctcttcgacaggcgcgaatgtttgcgcgtagacctctcttgcgaatggttcatcaagtgttccgcgtatcattgcgcggctagggatgatctggacgacgcgcttcgtgattcgttcggcagcgattgtggcgatgagtgacattgccgtatcaccgtgggagaacgtgaggacgctttcgtttagctctcgtgccttagagctgcgcgagctgtggagcgtcttgatttccttggcatcagcaccagccttcgttactttgcttaggcatggcgagaatgcgagcgctccacactccgggcagtcgtagttgatagcggggactgactcgcgtgaaatgagttgccctacgacggacgcggtgacgataccggcacgcgcttgaagccattctggcgtgttctgctctagctcgcggtagacggtgaggttgtcgctcacggggtcacctcgaagatttcggttggtagccattcttggatgtcattgtcgcggtgaaattgagcgccgaggatgcgctcgggcgaaatccaatcactatccacgtcgcgcatcaatcgccacttgccctctttgccgcgcaccttcgttgcgatgatcactgagccgggctcggttggcagggtaggcgttggacggtgcacgaggaaacatgtgtacctatttaaatggaacgtccatactgtcccactgccaacctctaggtagagtccgtcagcgtcgattgcggtaaccttgccctcggatgtgtacctcgtgtcgagatacacccattcgcgccggatcgtgtcaccgacgcggatgtcctctggcctaatttccttttccataactctccctttcagagtgcccacgccgcgatgcacggcgcgagaatgacggtaaaaacgaaacccacgccagcgaggacgtgggttaggggtgggtagtcggtgggggtcatgcggcggcctccaaattcttcacagccgttagcgccgttgggtcactgatgattccaaggatccgcagctcggcgaagaagtcgaactcttcggtcatgcggtccatgcgtttctttaggcgagtcgcaacgcgcttggcgtattcctcgttgattccagggcttgcctcgatgatgcgattcttgaagccagttactgtggacaattcgttttcgggcatggcaattagactccttatctgcgctggacccgtgggtcgcagtcggaatactgcttgggggtgtttgccggagttaggcggcgtcgcggaggtggtcaacttcggttcggtcaaatcgacgctggttgccaggggtccgggttgcggcgatcttaccctccgcttcccagcgtcggatcgttccaactgtgacgccgagcactcgggcgacctccccgatcgttagttgttctggtgtttcgttcatgactagaacctatccaaacctaatcaaacctgtcaactgaaatacgggtgccggtcgaagtctgtaggaaacctacaacggctagatcatggcgttggcgatttcatccagcgtctcgtctcctacgacggcatagtgagtcacggtctgcaaggatgaccagccgaacgcctgcgctacagcctgcgggttgcggaccttggccattgcctgggttgcccctcgcttccgcaggtcgtggaaggtctggttgatgccggtgcgctccataaatcggttcaccttgcgttgcagcacggcggcgctgtattgcccgcccccggccgtaacgacgttcccgccggtattcggcgcgataatgtcctggaggaccgcagacaggccattgacgcgctccttggcccccttgcctctgatgtagatgcgccgggattcgatgtccacattggaccagtcgagagcggcgacctctgcaactcggagtcccccatatgcgccgagcgctactgcccgccgtatttccaggtggtctaccgtgagcgggccgatgatccgttctaggtcagatttggcgattgggcgcgggatcttattggggacggtcggcgcgtcgagccggcgggtagggtcgtcgtctcggtggtcgaatcgcatggcccagcggtagaaggatcgcaggcatgctagttcattctctcgggtggccggtgcggcgtcgtatcggctcgcccaccacgcctcgacctcctcgcgtgtcgcggctcctgggtctgctagttgtttcagggtggctcggtatcgggcgatggtgtgaggcgagcggttgcggtctcgctcggcccagtggatgaactgctcgacaaggtctgtttccatgcccctattttacacggaagtgcgtataaggatgcttataggtcacttttaggcgcatgactacagaaccattccagtgttagtgatcaggccccgggtcgagtgttcgtgcactctccggggctgcctttggtttagcacaaaaacacgaatagcccccaccctccgtaagtggagagcgggggtctttgtgaggactcgcggtgtgccatgtggccctacgagtcatagtgattacagtctactcgctaatgtccacgtgcttgccgtcgtagctcgtgccagccgtgaattcagcgttgccgatggaggtggcgagcgatagcacggtagcgagtccggcgattgacagcgcgttcagccatgacacgtcaccgagtgcggcactaacgccgatagcgtttacaccgaatgcggcagtgaccacggcgacgaaagtttggaagaaggtcttgatcgcacgttccgccgctcccatccagaatgccttagtgaagatcatcactcagccgcctttacttcaacggtcgtcgtgcccgatactgtgaagccgcttgcaatagcttcctcagtgccgagctttgcgccgatctttgcggcttcctgcaccttggcggcgtcgaatactacgttgcttgccttggcgagctgtcgtagctgttcatcggttgcggcctgatactcacgctggcgaacgtaaacagagttcacctggttagccgttgccgccttagctgcgtcggcgcgaatgtcgctcaagtcagccttagacgccttcgcgtcaatagccgtcttcaactcagcgagcttcttgaaaatgtcgtctacggttgccacgtcgatttcgtcctttgcggtggtggaagttggtgtaacggttgctttgatgtagtagccgcgcttgacccatgcgcggaagtcgtccatgtcaatgccgcgagggtcaggtttgcggccaagggggatggcggtctctttgtgtccttgcaccttggagacatccagcccgaattcgtcaataagtgctcggcagagcttcacgtaggagtcgagctgcttagctccccacggctcggttccatcgcccgtgttctctgcctcgatgccgattgagtaggagttgccctcttcaactgtgcgtgatgcgccagcgtggtaggtaagcccagcggcgataacgtagatggttccgtcgcgccccagtccgtagtgactcagtggacctgatagccccgtgcgtccgttgagcacggtgcccattgatgggaagttcccgtttgcgccacccgctgtgtggtggcatttgatggttttcgcgcccagcattggcccgtgtccgcgcttctcccagccgtccacctcgatcacggggtagccagttgtacgcgctaccctcgctagtcctgtgaaatatggcatgtctcactccaataaaaagcaccctctcaggtgcgtagtgtgtccggtgatggtggcgcgtttggcttctggcggtggacttcccagccagccgcgagctgctgataccagatcgcccagcgttcgagccggtcagcgaagttcttgcgctcggtgcgctcttcctctagctcagcttcgaggatgtcgatgcgcttgtcttgcttttcgagccgatcctcaacactcttgagtgaggttaggagaatctggttcgcacccgccgccagcgcaagatcgtgcgcgccttgtttgagtggcgtttcggctcgtgatgcccggtagctccaaaaccccgcgccaccaaagatcgtaaggatgccggcgacaatggagatgattagcgtctcactcatttcacccccagctttctgcgtgccaccagccatatgacgagtagcgagattgcgcgtagggatgaggcgatgcccagtccagcaggtacgagccatgagaacacggagtttgggtagctaatggcgacggcgattgcgtagacgaagaagccgcctgctgagagtatccatccggttcgctcaatcccccacgccctgttgatagcttgcgagtcatgccagtgcaagccgatcacgctcgtcactccaccaaggccaatgaaccccgcgcagattgccacgagcggccacggcatatccgccattgctggggacggctggaaatggtcgatcgggatacttgctgacatgacgacgccgaatacgattgcgaggactgcgagggcgttctccattggatggacgaggatacgctcccaccacctcggcggcgtatagatcggatgataggtgcggatcatagctttttcctatgtgggattgtggcacgccacatgatggactcctctgggtaatttgtgctgcggcgagtagcatcagtcacatgatgactctcttgcgtcgggccgtgatgctatggaagctggaagtgcctcgtgacatgtgcttccagtgccgcgaactttcgaaggctcccggctctgacttctgctccggcaaatgcgctatggactaccagatggatattgcctactaggcgctaagcccttcagcccacgcttgtactgctccggccattagagcgaacccttcgccgttcgggtgaagcccgtcgttagttagttgagtgccgcccggtgctgcccaacggttcgatccaagcgaggactcgaccggtcccgcgaactcgatccaccctgccagtgggtggccttcctcgccagccctgattgcggtgctgtcgccaaccgcggcgtgcaacccgtccttgatcgggcacccgtcgcggatccacgagttatacgctccctgcacgccaggatgtagctccgtttgtccttccacggtagcccatgagtcagttgacgtagtgtatggattgatcgtggtctggtagagcttcacaccgacggggaaccgcgcttgaagcctgaaccacaaatcgacttcatatgtcttagaggtgttgaccccgaacgacgacgcgtttagcccgtgctcgacgatgacatgggtaacaccggggtctggtagcgccacagagtcaaagtaggccgtcgtgttctggctggcattagatccaccaactccccagaggacgtgtggcactccggctgcggtaagacctcgggcgaacgcaccatgctctgtgatgatgtcgtatgctcccgcagataccgagtcgccaaccacgccaaccgcaattccggtgccagtctctatcgcggcggaaggtgcaggaccctgcgcgatattctttgtaatcggccctgtcactccggtcaggtctacattcatagacacagcctcaccagtccggtgcgcgtcgtcgatgaccgtacaaggaactcggttcccctctgccacagatgcaaacgttcgcacccagtactctccgggagtaatgtcaatcggatcggtcaggactagcgcacccggctccacgacagccgaactggcgccgccaaaggtaaacggaatcagcgcgccagcgagcgtctcaaaggtcaccttgaccgtgtaggggctcggccccacactgagcccgccaagattattgaagacgagacggaacccttgccctgtgccatacaccacgtgcttacgtcgcgacgtaagagaggtcgtggaatcagccccggcacccccatatcggttattcatggggcgagtacggttcatcgcctgccgaaccgtctgcacatacacgggaggcgtccacggttccggctcaacgggcggctcggaatcaccaaacaccaaagcgccgctcgtccggtacacagtcaccagattcccctgagtgctgtaaatattcgccattacgcaacccccgccgcttgagcgtgagcaagaatccgagcatcggaaagcggagaattcgttactgcaaaccctgcaacctgcccaacgatcttgccgaacacgaacgacgtcatggtgggcaccgccgcggtcgccgtattaaccagcgtgccattgatatacaacttcgaaacgcccgcgctagtccacgtaaccgccacatgcttgcgctggtcgagcgtcgtggcaccagttgagatgatgttcttgaagtacgacgcgatctgacctgcggggtgaacgccgtcattctctggatacatgatcacaaaagcgtcagcgccgtattccagtatcttcatgccgccagtcggatacccagtcggcttcataatccactcccacgtcgcaccagtagacgaaggattatgcgcgatactggccgtcacagacgtctgcgtcaaagtcgcacacgtcgccgcgtcaccaatacccgtagcaccaaacgtgaatccagtcaccgcaactgtgccgcccgcagaaccaagattccgggcagtggaggaccccacagcatcatccagcggcaagtaatgcaacggactatccgcgagaacagcgttgtcgtaatcacccacaggaaccgtaactggcatggcgtccgtagtcttagcaatcgacgtacccaccgtctcattgccagcaccgtccttgaccttatgctggaacgtatacgacgtagacgccgtaagccccgtcgcagaatatgaactgccagactgccacgcagaccaagcacccgaattcaccttgaacgcataccccgccaccacacgatcatcagacgcaccagcgacagacaacgccgccgaattatgcgtcaccgtccccgacaaggtacccgcaacaggggccgtcgtatccggcgtcgaaggctcaagcgtcagcgcaatcttccccgggttcgccgcctcgtaagcgtcagcctcagcaagggtttcgaagatggggatgcctgcgccggtgacgccaactagtgcctcagtcagcttctcttccgtgaccagtcgtacatctggtgtctgcatactaggctcctagctcgaaaaggctgataaagtttttgtgttccattgcgctaaacctgttcaaagtagggcgtcccgtctgtgtcaacgaggatgcgagcgccagttgacccaatgctgatataaggggtgccgtctgtatcaatggcgagatttgtgaccgtcagccgttcgagctcatccaccgcgctgccgacttggaggatcatctcgtcacaccagcgcgagtactccacgccaccgacgatcatcttcacgcggcgagtggtatctaatgtctgaaatggggtcactagaccgtttgcgccagaaacaaggagtgttgccacctcgtcgcgatatgcgtcaacttctgcgccagtctcgaagtcaagcagtttcacaacctgattcgcgagtggccgcccggtagtggagtctgccaccactagttctgcgtaatggttatatgccacaactccccttatttagattcgtactaatcgccagccgagcgtgacaataaggtcacttggcggcgttgctgtgtcgtaggtaaagactcgaagcgtgacggttgactctgtttgcgaggcaaccgaaacccacacccatccagatgtttggatcgtgtaaacctggaagccgtaaccctctggtggcgcgtagggcgtcgagacgttcgccgttgccacgtacgccggtgagtaggtagacgcccatgtgagcgctggccccgcaatagttccggaggtctcacgcggcgtaatgaggccgacaatgaacaagcggcggttgcgcatctgcacccacacccgatcacctgccgcgagtggcgtgtcattgagtgcgataggttccgcgtccgatggatcgtcgtccgtaatgagatgcaccttgagcggcgacacctgcgtgatggttgcttcaatccatgaatccgaagcgctcgacgttgcgggcataatgtcagctagtggattacgcaccgacaacctcccgaagagtcgtgctgcacagtgcgccaagctccgaagagtaggacaccttttgcaccacggcgcgaattgaaatatcactagtcgagttggcgaacgtgaccacatcgccgccaactagtgggatcggcgcgtgctcaatatcgaagccggaagtgatctgttgcagctcaccaagtcgccgtttcgcgtaggccattgcgacagtctcagatgtcagctctacgctctcgacctccgccgtgagaatgcgccccgttgtcaccgtggagaacggcgagttagggtcattgtcttgcgcgaatccgcgaatggccggagcgtcactgtcgccctccgagacgaccacaacgcggttaggcactgcgtaatcgtcatagtcttcggtgaactctggcgcgtagatacccttttcgtcgtcaatgaacccgaactcaaccgctcgatcctgtggccgctgatatggctgtgatcgaaaatagccgttgccgtccgcgtagatcgaaaagtaattcacggcagcgagcagatcattcacgatacgcagaaccgttgttcctggttcccatgtaatcgccgtgcgcaaaacttcatcggagtcgtcaatcacgtattggggtaagccccagaatgtgagcaggtacttcactcgaccaatggcgttgatgccctttgccgccgtataggtgttactcatcttgatgtcccgcaacagcatcatgcggtcgtacatctgaaattcccacggcgaacccgtagcgccatgcttgcgttgcggcgacattgggacgtagacacccagcggccatgacgcgacagaatccccagccttgactgtgtataccgggcgaatcaagttgcccttacgccagtcaattgagccaaggtaggagaatgagccggagccgcgcacatccgaattgaagttcagatcgaccgaacacgcgtcaaccccatccacttcctcgatgaggtttaggtttcgatcgagtcgctgatacgtccagaattcttcgtggcggtcagtaagcgcgtcataagtccgacggtcaataagatccgaaaatacgacgctactcaatgaaatccacctttcggaagctcagtgagacagtgcccttgatgcgctcaaattccagtgcagtcccagagttgggctgcacaaactcgcgaacattcccgcccgcgccttgcttcatgtaaggagcgcgcacacagaaggttcccgcgagatccataagcgcttcaacctcggacggcgtagaagagttatcccctagtcgccctgaaacgctaactgtcttgtcacgcgtctcgccggtagtagctactggatacgagcgccctgcaaagttgttgaatacccgctcgcgtgtcgcgttgaccgaagccgtggcgaaatctgcaaacttgatcacttgcgagaatccggggccggcgttgacgtagacgaaaccccgatgcttggacgtgtcgaggataacttctgccgatgtggccgtggatggaagctctgaggtcgtgatcacgcggtaccgattgagagcattcacggccgggagctggtcaacaacagactcggaaagacctggagtaaccgagattgagttagtgaccgcaacccaatcacccgcgccagtgtgccgctctaggtgccatgtaaccgcgtccacttcgccagacccggggccgggaatggtgacctcgataaccgccgcgcctgtggaagtgtcatagatagccgtagccgtggcagatggtggcggcgcataggagaccgtgaacacctgcgaagtatctgcggaccacaatcccgccccgtcgcgaacggcgactttgagcgtataagttccaccgttatcgagtcgcgttgcaagaactcgcgatgatgccgaacctgatccggtatatgtttcgagagtctgcctagactgaatgagcgtgacgcgataagctgactgattcgttgactctggatccgcataagcccattgagcggtcagcttggatcctagaaccgtttcagggctaaggatcgtcgcgataggagttgcggacagtggcacaacagcaaccgcgctccactcggagccggtagcatgatcgccccacgtttgaacctgccactcaaagctagtgccgttcgcgtaggttccagccgcgagcgcgcgggactgtgtagggcttgccgtcttggcgaccgtagtccacgtcgaagcacccacggcgcggtgacgtagcgagtagtacgtttgcgcggtggtgtccacgggattgtgacgccatgagagcgtgatcgcctttgcgccatccgcagcgttgccacttggtgcgagattcgttggcgcgttcggcggtgccataagttgcaccgtggccgattgcaccgaatagacggaatagagtcgcccaaaggttgcatcgtcaacgaaagcgcgcacctggtaagcgtgcgtcttagctggatcgggagccgttgcgacagtagatgccgcgtttgccgccgtgagaatcgttggcgttgtcgcaacaccgttcgcccagtcctcgacctcgtagcgcgcttcgacatgtgcgcgtcgagtccacgaaacggcaatatcgccgccagacttcgcggccttgacatcggttggcgagattggcgcggtgtaaaaggtgggcgagtaagcccacgccgaagaaccgctgtcattgttggcgcggacacggtaacggtatttcttattcgagaccgtagaagtgtccacgaatgacgacgatgaacccgcgagcgtggagatcgtgacgtatgagccggagcctagaacgtctgcgcgctggatcgtttgcgtgtcatagatcttcgttggatccgtggcattcgtgcgcgtccacgagaccgtgtgccgcgtcgaatccgtgcgagctacagttacagcggttggcgcatccggtgcgtagggtggccgcttggctgtcgtcgtagaacctgaagccgtagccgtgacggacccgccgacagcctcaatgccactcagtgagccggagaagctagacgtaaccgcgccgccatacagtggcgagaaagtacggttgatcgtcttgatgagctgctgattagacgtagaccactgtgaacccgacgacgtggaaactgagacgctaccggagaatgagaaatcgccgcttaccgtgagcgagttagtcgaatccgagataggacccatagtccacacatacagcttcagtgtgaccgtaaccgaagatgtgccggttccaacggtggccgggctttgagtaaactcgtagcccagccgaataccgttagaaccgccagtcttagatgcgccccaagtgatagccaagatagctccttatcgtgcgcggacaaccctgcgagcgtcacgcgctagttcgtctagttggcttccagcaacttcgcgcacgtatcccgaaaggcgctggccgttttcgagtaccagttccatccgtgacggtgtgcgagatgccgcgagagacgcattgattgcgtcgaagctctgcgagttgctgacattgctcagagcgcctagaagtgccgtgagacctgccgaatcgcgagccgtgaacacattgccaggggagctgaaattcaccagctcagggccttgctcgcccacgagagaccacccggaagcgcgcccgccattagcgaacgccttgacgggaccgccaccaccgcgctggaggtatccagcccagttgaacggctgcccgttcttccacatttcaacgtgagcgtgaggaccggtggacttacctgtattgccggtaagcgccgtaatctggccgcccttgacgcgagagcctgcacccgcgagaacctttgaaaggtggcccacgtaggtagagatgccgttcgcgtgatcaatgagctgaccaatacctgtacgccctgcaacgatgttccagcccgccttgcgaacgatgccgttgtacattgcgcggaatggcgtaccgactgggcttgcgaagtcgatgcccgcgtgcgggtaacgaccacgagacgtaccaaagccggacgtgatgacaccgcgaggacggtagaagttgccaagcggtccgtcgtagccgaagtacccaccagcgccgccgccgaaatcgccggtcatctgatccttgccgcgaatccatgaaatggccgcgtcgattgcacccgtcgaagcacggcgagcaatatccgggaaagcattctctccaggtaggagcgtcttgattgcgtccttgacgggattcagtagcattgacgccacatctgccagtccgccacgcacccagtcgagaccgttgccgatattgcgcactgtgtcgcgcccgaagtttccaagctcttccagccagccgccgattggcagtggggaattcttggagcgtccgccgttgagcgtatcgagtgcatccattggcgcttgctgttgtgatgccaacatgcgcttggtctcgttcgccgtgtagacgtagccggggcctgtgtggataagctcggggccttcttcgcccacgagcttccagccgttgcgcatttgtccaccagtggcgtatgcggggacgtcaatcaatccaagtcgtggcagtgcgtcgccgccgacgatctcgcgaaccttgttcagggcaacgcggagaccatcgttatagacggtgccgataacaaagttgattggagccgctgcgatgcgctggatgccattccagatcttcttgatcgcatcaacgccctttttgaacgctggctcaagaacgtcgcggaagaagttaccgaactcgcgcaatgctggctggatgacgtcttcccacgcatccgtgatgaccttagaaaccttgtcccaaaccggcttgatgatgttcttatagagccatgtaaaggctggtgagaggacgtttttcacaacccatacaatggttcggaagatcgtatccagaatgccccaagcgatagagacagctgcgacgatagcctgccaaactggacgaataatgttctcgtaaagccatttgaagattggcgctaggacgttgttgatgaagtcgcgaatcgccctaaacgctgggagaattacactctcccaggcccatttcacggctgccgagatgccgttccaagctgggacgatcacgttttgccagaaccagacaatggccggaatgagaacgttcatcacgaaatcgacaatggccttgaatgccggttgaatgacattctcccaagcccacttgatgaccttttgaatgccagcccacgcttcatccatgaacttccgagcgtcctcattggtctggtagagatacaccagagcgccaactaggagcgcgataagaccaatcacaatgaagatcggattcgccagcattgccgcgttgagtttcaggaatgcgacgcgagcagccgccaagaatccaataattcccgtaaccgtcttgtaaataagaagaccagtgaagaatgcagccgcagcgcccgcgatagaccacaggagcggcgtattcttaccgagccaatcccagagcgctgcaaagaatggcacgagctgttcgtcaaagaatttaccaatagcctcgccagcctttttagcccactcttctaccggctccagaagcttgagcagccccttgaagaactccgtgaacttcgggtaaaccttgctcaagaggtttgcgccaacgcggccgatagacgcgagcgtgttattgaaagcaccctgcaacgtgtcgccagacttgagagcagcgccgcccatgccctgctccatggctttttggaaatcctcgaagccgatctttccctctgatgccattttctggactgactcaggggtttcacctagggactttccaaggagctggagaatggggatgccgcgctcgccaagctgcgcgaggacttcaccctgaatcttgccggtacctgcaaccttgttgaagattgcgcccatttcattcatgggaacgccggcaatagtggaagcatcagcaacaagcttgagcgtgcgctctagatccttgccaggtttcacgccagacgccacagccgaagccgcaaccgtggccgcttcatccatgccaaacgcggtaccctttacggatttcagcgcgtcattcatgatggtctcaacggtcttcgtatcgtgaccgaggccggctagtttagcgcgtgcattctctaggctctggagtcgtccgaagcccttagtgagtgccaacgcgaaaccgccagccgcagccgcagcaccgccaagcaatgcacccttagcggcaccagaaaacccggagccgaagctcttgccagattcttgaccacccttagaggtgccgtcaacaaccttgccgacttccttttgaaagtccttgaaagacggtcgaatcagtacctcagcaacgccgatagtaggcatgcgacccccttaaaggatttagttttttggcggctttagagtgacgtcagagcgcttgaagccaaacatctcagcgagtcccgcgacgtgctcaatctcgcgatcagcgcgtgcttcggcgagtggatcgaacggcgctgggaatggcttaggtttcggaggcttgccaccagctgcacgcatggcgatcatgttgccctcttggattgagtgcagaagctcgcgaagtagctgctcagtgagtccaaactctgtgatgcttggatgccactctggagtgttatcctcttcgtcgtcggtgcgagattcttcaatctctagacgcgcctgaataaactcaggatccttggacatcgcctcgaagtaacgcgaggtgcgcgggagctgatcaatgagatccagcaatgccacgtacctgcggcgctgatagaacaatgagagatccacgccgtactcatgtgcgagatcggcgcggatctctggcctaaaccgttctaagagcgcatcgaggcgttctagtttcccgaggggccgaagaagtcctcaaagtgagtcttgacagcggcgagaatcttgccaatctgaccaagcgtgaatttctgcttgcgaatcaatcgaagctcttcttcgggaagccattcaccaagaatctcccacaactcatgcgggcgaatcgtcgcagctcggagcagtcgaacacctgactcagcttcgagttcttccggagaaacaaaggtgatctctgacccatcggcgagcacgagcacatatggctcaacgtcctcgccgtctttgataatggatccgatggtgtgacgtggtgctggcttatctgaaatcttgcgggcggctgccatgactggctcctttacttagatgggtttactggcttggcttcaacgattggcgcgggcttctcttcaaagaatccaagtgccttgagtcgctgaatttctgcgcgggttggcttgcttacggtgaccttttgggcaccattggaaaaagtaggcatgactacctttcgtggggcggcaatgaaaagcggcgcgcacgagccgcccaaggacgtgcgcgccacaactaggggttaggcgccctgggtgtatcccagaatgtccttagcgagaatcgcgccggagccgccgaagtaatggcgaaccgggacgccctcgacgtcatcattgaagatgtcgaacgtcacttggcgctggtgagcaccttcatgcgcccacgtctcttcgccaagggatgagatctttgcggcgaagaatccgcgcccctcgatccagtgattggacagtgggccgtcagcggatactacgatcaggcggacttcatcgaagttcgggaggtctggctcatcgaagacaacttcaccagtcgtagcagactgcgtttcggtgatcttcgtaccgcgcacgagttcctgaatggcctttttgccggattcaagaagcgtcatggaaacggtgcgcggtacgcgggtaacatccgagcggaccgggctgtaatagccaagtgcgtcaatgtcttccttttcgatctcgccggagaacgtgtaaccgtcgcgggtaaccatgccaatgggaatgaagcccagcgtggacaggtctgcgatttcggttgcagaagtaaggagggtagccggaagctcgacagtcttaggtgcaaagcacgcgagacctaccgtagttttccgaacgagtgcgcgggagtcgaagtccttgcgctcagtttctactgtggacatagcaaataacccctttcgagggtgtcaatgtggagaaaccccgagtggggtgaaaggtgggcgactagtcgagcgggcgaacgatagtctcaatgaccgccgttgctagatttagagtgtcttgcgggtaaggcgattcagtaggcgggacgatgcactgaatggaatcgaagaacacgtcaggcccctcgatgccgtcaccacacaatgaggtgatgatgctttcgaggatcttctttgcaagctcgcccggcgcgtaaacctcaatcagcacacggtcggcacggtcgatatagccgatgtttccaccagccgaatcgaggaataacgcgagcggaatatgtgagattccgttagcgtcaacttccatatgctgagctgcgtagatgactgaaccagcgtgttcctcgccgtccaccatgagcacgagagccttgcggatgtcaggccaaatgagagcgtcgtacattacttactcaccttcataacctgaataaggcgaagaagaacctgatcgcgagcgtcgcgccaatgctgcgtcgtcacctgcacggacgcaccagaacgctcttcattgttgcgaccaaagcgaaccgacgtgggcaccgctgaatactccgcttcacccatcgagttagccgatcccgcaacaccctcagcaacctctagagtcgccttgccgatctcgctagacgcgccaagaacgcgcaagccctgattcagcgagcggtaactcttgacgccgggaatcttctggagcttcatttctttagccccacttcccagccaaacggccattcaccaggacgccccacgattgaccaaataccagccaaacgcgagccttctgggatgcgtatccggtcagtgttcaagaacgataaaccgggcgttagatcgcaatacagcacggcggttgcgtctgcgagatccgaaaagtcgtcctgctcagtcgagacgcgaggcgcgattagaccatgcggaacttcaatctcggattcgggaagcggattagtgaacttgtcgcgaccgccgccgcgaagaatcgtaaacgaggtgcgccatgaggcggggaaacgggtgactatgcggttattcataaattggaacccccgcaatgtcagcgccgcacgagcagtagagcgcgccaaaattcagattgcaccaaggacgatgaataaccgcatagaatgacgcgatctgaaccccgaacgccgtttgacgcccctcacccagcgcgcggcgctcttgcttggttaggtagaagtcgccgtgtggattggtcggcttggcggtcatctggaatgggccggctccaaactggaccgactcattgccagccatgtcgccagatgccattgcacgttttacgacagcacaaacgatgcgccgaagtgtgctcgccgatgcggccagcgcactgggaacggtgtccacaatgaactgactagcatcagcgagcaacacgttggcgtgatcctcagcccctgcgggaaagtctggccagcgctcaataagctcagcaagtgtcgcaaactgcgttacgtcggccatgacttaccccttatttctcagaagctgcggatgccttttcgacaacctttacgaacgtctgatccagagtctttgcagtctcttcgtcaacgttcacaatggagccggttaccttatttttgaagcgaggcaagttatgcaaccttgtcttcgataacagcgaagcgatcagcgaatacgtaccagccgtaaacaacttcgaggcgaagtgcgatctggttcctgcgcttgaggtcaccctgaccgtctggatcgccgaagcggataagctcaacaggaagctcgcgctgaataccccagcggatgccgttctggaagtcgccaaggattgcgcgaaccttcgtatcaaccgcctccggggtgccggatacggtgttgccctgagctgctgggatggatgcgaacgaggtgatgtccgttccgagtccaaggttcgggtagcgctgagacccagaaggggatccgtctgcattctcggtctggaggtcggcgagcgcccaagcaaacttagggtcaatcgcgatgccatttacgccccaggatggggccgaattgatgagcaggccagctgcggtgcggatatccgcatcagcgtcagccgtggcgatttcaacacgcttcgtggttgcgccaacatagttatcccaggcggtgataacggatccggtaagcggattgatgcggtggtagacgccaaggtccaggccgcgagaaagtgcttcctgaccggcgcttgcaagctcactaaagacgttcagctggtaatcctcggatgcccactgaacttcttcgctgaagcgcatcgtaacctgcgccttgtgaggcttagccgtaacggggctgaagccgccactcgtgctcgccttgtcggcaccctcttcaacaaactccgcctttgggaagtcgttgaatacgatgtaatcggtctcgccgaacttcataggctcgcggcctgaaagctttgcgacggtagaaagtgaacgggtttccttgatcatgccgtccgcgatattgcgcgggagcagaaccttggcttcagcggtgctgaaaatagccatgatttacctttcggtttatgcgccaaacagggagcggacggccttgatttcgtcgctcgcctcaattggcgctggaactttttcttgcccttgaataactgggccggactgtggaacaaggaatgacttcaactgctcagcatgggcaactagttcgtctcgcgtgccacctcggaggacgtctggcgcaatgccgtattccttggagatttcagcgagccaaccattgcgctcagactgcgcttcgaactcagcaaccttgttttcgagtgcagacttttcagagagaaccgactcgaactgctcagccttagccttgagttcgtcgtatccctcatactttttgcgctcgcgtgcaacgcgctcgccaatgatccggtcaagctcttcctgtgaagaaggagccttgaattcttgagcactggttaccgcgtccgcctgaacggcgttagtggtttgttcgtccaccgtgctggtgttgtttactgcatcgggcatgccgaatcacctctccgtttagccacgtctggcatcattgaccgcacttgaacgggtgcgtgccgcttcacggtgggccgtgaaaaccttgttagcgcattcctaattcggagcgcattgaagcgaggatctgttgcttcttttccttgtcggagcgagtttttccgtcagcgtcaacccatcgccccttagtggtgcgattaccgtcagcgtcacgctctccaggaatccactcttgaccctcagaaaccttcttcgctgattcgctgtattgctcgtagtagcgatctgcgtcctgttcgagcttgaaagagttgccctcatgcaccgcaactacggtgcatcggcaatagtcgtgaaagctgtctccgagtcggcgggatccgcgtggacggatgccctttgcttgaccgccacggcgtcgaacctttggaatctcagttccacgccctacgaccgtttttgcggactcgtaggagccatacgtagcgccacgagacgcgagcattgcgcagaacgcgcagcagccggcactcggaacgcgctggtatccaaccggggttgtatcaatctcggcgttgccaataattgtgtcgaatgacgcctcagtgagaacccatgtcagcccgcccgcaatacgcccaaacgcatcagcgtccacgacctcatcaagtgcaaccgaactcgtgccataccctgccaaggagtgccaccgcgagcgagacacggactcaagcggttccgccacgaatgatccggagacctcttgaagctcgcgcaactcgtcgtaccacttgacgctcgcggtgatcataagatcgccaagtgggccgaagatctccggagcaatatcaatcaattgctcgcgagtaatcccagccgcaaccaattgcgataatcgcgcataggcttcgcggcgaatctcttcttgaaccaggcgaaagccttgagtgacctcaatagggaaaaccgtcacgagatcccctaactagtcaccgatccggtgccggttgaaccctctgcggttgcgaccattgactgcgcatcacttccgcgattcgcgccaatgttctggactaactgcgtaattgcagagcggttcacgtcggactgaatgcgcttcacctgatcgtcgtcaaagaccgtttcaagcaatacctgggactgtgcaagcgccggattcgcgctcgccagcttcacgtaagaatcggcattcgcggaggttgaccggaactcagggtccgcaaacttcgcggagagttgccacatgtcagaaggtggttcgcttagcccatcgcgcaccatgacggcgagtgaggcaatatcgcgaacggcggttccaagaacgtacttgttctggaatgtcgcatccacgagtaggtcatgcttattcgcccggatagcctcagcggatgacggattgtcatggatgattccaaggcttgccggtggtattccagtttcgccagagaatgccattgctaccgtgcgcaacatgtccgagtgtggagccattgttgcttgctggagttgcttgatattcggcgcgtgaccgtccgcgtctcgcgtgagagcgataagacgatccattgcgagctggaagcgcttctgagatgacgggtcaccgtcaaacgcctcagcgtcaatgccctcaatggcaacctgtggcgatgagtagaactcagcattgccttccatgcggacataggctcgaacggccatatccgtaagcgccataactggattagtaatacgcgaacgcccaaacggcttccctagctgcggatcataggtgatcgcgaccgctagggtgcgcccaataatgtttttcgtgcgctccgtgatccacgttcccttgccacctaagcggcaatgaagaatcgcgtcaggaagataaacaataaatgcggacggtctaccgtttttagtgtcggtaatcgtgagcgccgcagagattgcgcggcgtcgagcgtcccagagtgccgagctatgctctgcggaatgcgtctgaatctgaacatcaggctcaccaggagcacccttggcgaccgtcgcgaaagatacgccgtgcttatatgcagaagtgacaccctgtgagaattcgagaccgaaacggttggcttcaaaaacctcgccaagctcaaacggatcctcagagccggggagtcgtaagccctcaaactgactcattgacgccagcttgcgaactgccatagtcgcccagccaaggtagaacttcgcgttctttagctgcggcgggagcatgagtccaagatccttgaacgcttgttcgccgtcgtaatagaggctgcggcgctggttcttctctaggcggccattccatgccctgagaagccccgagattgtgtctcgctcagcatcggtaacgccggaaatggagatcttcgagatgtccgaggtagtccaagtgctcacaagaacaccgcctttcttctcggatttcgagttgtagtctttgcgccccagaatgcgaacgtcacggcgtcgaataggacgaccgtgccgccgtcgggggaagcccagccgaagccgccgttgttgccgatttttctctttacggctggttttatttgatcgtcgagcgcttgttggctgatatgagtaatgccgttatccgcgattgcagattcgaacattccgtgagctgcaatagcttcatcggcggatggggtcttgattaccgattccggaattccctcagtccttagagcgtttaccaaatacccaactccagactttccttcaatgacaatctgggcggtgctttctttgcgctcaacaagccaatcaatgagccatgacgtgccgttgctcgacggggcctgcttgatagcctccacatgcacggggccattggcggggcgagttgcggcggcgagaccgattgcagatccatcaattgagaacttcactgcaaaaactcggatgccgtcacgcggaacgtcggtagatgagatggaacgagccgcccacttatcgaagttgacggcctttcgggtgagcgaagtttcatcccagattccgagagcttcgcgcttgaagttctcatcggatccgagcagctttctcattcgaagaattgccgcttcggttgttcggtgaggataagaagggtttgcgattgccagctgcgaacgatcattgatgttggcgtttttatcagcggaaagctcgatatagagacggtcctcgtcgccgcttagtgcgtctgagcgagcggacgtaaagacctcgccattatcgcgtgggcgtggcggcgtccccatcatgaaaactaggccattgggtgccgcgttcgtcgccggaaccatatccgtcatggcgtcctcagagaggatctgagcctcatctagaacaaggatgtcaacctcgtcgaagccgcgaccaaagccggattcgcgagcaccgaagaggattcgcgagccgttgacgaatgttatttcctgctcgccgttagtggcgcggacattctcaatccaaggcgcaactttcggcttcttggcagtggactgcatcttcttgaatgtctcattgtgcgttcgcgttctatgcgcagtccagatcaccgtgagattcgggaagagtgagcacagggagaacacgataagcgaaatgaggtaggtcttaccgacctggcgagggattgagaggatgacgccgccaattccagcggcgtagagtccagagtcacgcttcgctaaggctaggcgaccaatgccgtcctgccatgcatcagagggcatacccatcttttcggcgcgctctttgacagccggccagcccgtggacactattccagtggggcggcagatatggcgagctacctcagatagcttcttctgaccactccgagtcttcggttgcgccaatagattcggcctcctcggacttttgacgttttagcgtctctatttcccgagagatctcaatttgacgacgcattagagcggcgagggctgttgggtttgtgttcgggtcatcaatacgcctcgacgcaacgcggcgcatttgctccaactcatccagcacggtgccattctcggcagcttccaacacggaagtaataggcttcggagccgctacctgctcgccgtccttgactgctcggagcgatgctcgctttgggtttgccatactcgctccaatcggcgctaaaaaaaacggacggggagggatcgctgtgacttgaagtcgcggc

SEQ ID NO: 332 - DNA, 1937 bp, Zea mays
  source 1..1937: mol_type = unassigned DNA
ctgaggctccctagtcccctccccttttatatgcccaagaaggggcaacatttacgagataggtaccaagtcggttacctaatacgagttgttatcgagtaggacccgagtcatatgcaagttgtactctattcttttatatgtatgcctttcttttctattaggatatcggcatgtcgccatatccatttgattcttgaccatatttgtgctgataaaatctttgtcatgtttatccttctagaattctcctgatgataggtatcctcctaatctggatcacataggcattgggctctcgaccaagcccatgagctcatctttacttgtactccatctcaaagctcgacatggtacccatgatgtggcagtagccttgagtcttatttggtcatgttatcgaattgggcaagtaaagctctaatattgaatcttctatagcaacttgttttttattttataagtcgatctttctcgagtcctgtggttgagtccctgactcaaccatcgagtcaatgcactgttcaggactcgtcgcttttcctaaacacatgctcagactatattttgtgcgtcacaacttccacatcccattataaaagaatttccccatgacacttggtcttgtttgagctgtccattcacactcccacttttccatagaacatcacatttgtcacgatatctctcgaagcactttctaacctcatcttctcctctgacgccagattcccaaactacaatcatggttgcctctcattcgcatgaatttgaggtcgccataattaagtccaaggcccttaaatctttggtcatgattgaattacttcaagagaaaatataatccagtggaaaattacaggtaaagaaacctatcccatgactaatgctgacgagatcaccatcttttcttccttcttgatgcaaggatttagtctccctcttctcaattcttctgggatttgctccattattatcaaatcgagcttgttcatctcaaccctattctattctgcacatcaccatcttcgcgcacctttgtgaggcatatttggaaattccttctgtctttcccccttttagtatcttttctttcgctggccttgtcccagcaaagaacatctagctatagttgggattaagcttcgtgctaacaactaatacctcaactgtcctttgaaacctcccataaatactagcacaaacttttgttttatgttgaaaatcacgcccccaaaccacccgagttccttggaaaacaccctattccttgacttgagtagatgagtgacccactatccaagcacatcgatgccatctctgctacgatgagcaaaccaggagttgagagccctcgtcctctcgatggtgcatgtggtagggagctggacctagcgatgagcccccctccatgagaaagcaaactttgcatgtgaatatgatagagagactaatccctatcaatcaagagttcaaaccatcattatgccaaaggcggaggactagcttcaccagggattctcacccatcgaagactgaccaaaaggttgattgacaaaggcatattctatacttaagccatgacccaaggtactttaaggactatgccacttatcatttttttctgatcttgtttaactctgtcataatcattcctcacacttttaaatgctaaaacattatttgcttttacataaatttacttgggcaccaatagatgatgaggaacctgactcgagccacttacccaagtagcttgctgagcgagcccccatgagtcctcatgccgctaagaagtcgagtactcctcgtccatagaagaacgaggaaatagtctgagtcaatgactcagacaatgatgataatgacgattctcttcaaccctggctccaagtccatgatgctccaagaatcctatatttggcatttagatcagg

SEQ ID NO: 333 - DNA, 550 bp, Zea mays
  source 1..550: mol_type = unassigned DNA
agaccgagacccaaaggtgctcctctactccaccaaaaaaatttcaaagaaattgcatgactaagattgtgaagcttcccacaaacggctgatgcaagactatttcaacgacccatgtgtctatcccctactctactttcgtcaaaggcaccacatgcgaaggagtctttttttcttcaaattttaaagaggttgggtaagcattccccctattttactatttgggtcatgtcactcaaccgcaatggtttgtcccctcacaaaaaatgcactgcttccctccacatgcttgcctatggtagcattgctgactacattgatgagtatatcaaaatagggaaaagctctcccttaaactaccttgaatatttctataagggtgtcatttcatgttttggtgaggagcatagttgttgtcatactactgatgatcttaggcgtattttagttaaaggagaagagagctaatttcctagtatgatagagagtatatattacttgcaagaaattggaggaactgtcccattgaatgaaaaagggtagtttacta

SEQ ID NO: 334 - DNA, 5419 bp, Zea mays
  source 1..5419: mol_type = unassigned DNA
gattgactagacaacttgttaacactgatcctgcctataccaaaatcactcacaagaggggaaaaaacagccacgcatgcttccagttcagactcactccagcatgacatgtttgatccttggacttcctttttagacagactaacattgacttcagttttgatgtaagcacaaatgaacatagagcaaaactacagaaatggcagactgaaaaacaacaagaaaatagaagcttcatttcagttggaatttcccagaatgggagcttctacgattgtcaagtagaataaatatcaccctggatcataagccaagagcattattttgtaagagactaaatttagataacctgtcattgaattgaaaagagtgttgcatgaaaaaagtaacatcaggttacaattacatgcaataaacagcatgaatgtgttatgtggggcaagcaatacaagcggagagggaagatgccaactggcctggcagccaggaaagtggctagccacgggtttgaccgtgattgccgacctggagccgaacctagtctattggttaaggaaataagcaattaggatatttatttgattgtgacaatttaggcttcagttagggccagaggcctatgtaagccatttggcaacctggaatcaagattaagcaatgaatcaatttattgccttcatcttcaaaatagggagccaagaggtaaaacctcgcttggattctgccggcgagtatagcctggaagccaaggaactccgcctacacctttgctacctccttaacgacaccgtaacagaatgtaatctagcaaactacctgtaacaaatcatcttcgtattgcaattttacgcagttccatgcgtgcttgagagaacatatatacagtaaaaggcttgtgaacaccaatcaaaataaatatgtgcttaccaaacagaacagctgctatcttaagctgcttatcaggatacttggggaagaatttatattcttcaaaaagatttgagatcatacagtcgaaaattgatacctccctgtcaacaatagcattcaaataatacaattatgaactgggcacagaacagtgtaagcaaaattctactgaagcacacagatgacagatctacataagttattgcaaaatagaacagagtactaatcaggcagcaactttgaaggcaaaggaactaacagtaagcattgaaacttctagattatcctaagcttatgtcaaaaaaatgtgatcctaccaaaatactgccccaatttggaacaaataatgtctataaagcatacgcataccttaaatagaatatacagcataatatcaacaaacaaaaaagcaagtttcaaagaaatgatcatggctgtcaattagcactcgggttaattaaactgttgagcatatatcttcttcaatatttggtaagctgatccaaacttatttccatcaacaagtttttgcagcatgttgtgaatgattgtccaaaccacaggatgtcagaaaagcaacaaaaatcagtccaaattaattccagttatagcttaaatttgcacctcttattcgtagattctttgaagcgcccgagcatttgtatcatggaatcaacgcttatttgtccagagaacatgtgttgaaaatatgcattagcctctacttcaatgtcatctgaccctccctctgaattagtaagttctctcacaacagagctaggtttcctcgattcatacagagcacacaatttctttatttcatccagtattacatctgacaagagctgccccgagtgagattgaagaacctgaaaatgtgcatgacatgaatccatacttgtcccccccccaaaaaaaaatccaaaacagcaaaactgaaaaaaataataaccatgaccatacagacctttatgaagacacaacaagactcccaatataagtttttgacaatagattgaggttgtgacatgccctctaagacattatcagtgttgctcatagttgctttcaggaaatcaacacattcctgagtgtaggcgagttgagttaggaaagacaaaccttataatcaagcattgaaataaacgggtagtttgctaccagaattgaacaacatgatggatgtgggaagaggtcagctgaaatgtagcagcttacaagaatagattatgcatattacctcaacgaaaccttttccatataaagataacttttcagtcagccatttctcaagatgactatagtctttcctcaaggcagcagcagccaattttatagaaaatgcaaatggagtagaatcaaggacagaagacagaatctgtttaaagtagaaataaaagttgagtgaaacaaatttgtgagaaaatagtgttacagcattgaagtaatattgtagcatggtcccaataacaaacagatgaaaaaaaaagttactttcatgtggataagttttgatacgatacaatttcagaaaataaagtgcattcctcttatacaaaccttcaagtcatgacaaacatcaacagttcttagcaaacaatctggatcactatgagcatcaacaaaacctcgaagggtgaagtatgggtttgtatgccagagataattcataacattgtgctttgttggatccttcagtagagcaggaaatatgcaggacagtacttcatactgaaggagattatacacggtctgcaaagagacaaggggaatttatagcactgctaaaaacaaataaaaatagatgcgactcattatgtgggaccagaaatgcatacgtcgatgcagctaacaccaaaaagaaagagataaggggaacttaacactattaaagtcatgaaactagaggcaaacccattaggtgggaatagaaatacatacagtgacatggctaacaccaacaagtaagagttcagggcaatgtcccagtggatactcaagcattgatcgtacagatgtagcgtacccaacttcagctagttggcataaaacttctaaaaggtcaaggcaggaccaagcatgattgccttgactaggacctgccaaatcctgaaattcctacagtatatgacaactgttaggtgtgaattggatagaattttatcaagatgccagatgttgtcagaattaccaagtgcctggacgaatgagcaaatgtaaatttatcaggtgaagcagaaactgcatgcttcaagaacgatatctggccttctctgtttttccacaatgacccacaaacagcatgaagtggaaatggatcctgtataatccaattaatttattaagcagctagttgattttccaagaatagaaatgtttatatatacataccttgcaagcacgcgtgtatatagacatcaataggtaaaagcctgtttcatcaggtatattgaaaccctcgtgatcaagatattccattacacgcacccagtttgtacttggggcctgcgtgttaaagagagatagagcgtaagggtgcaagataaaaaaaagaacatccaataaaaaagcaagaagtcaatagcttacgagttcattgattgaatccacaagaacatctgcgttccatttagtcagctgagatgagtcgttcgtgtggctattaagaatagcagatacaaatgttgcatatctgttatgggcatctccaagaccactatgagtgccaacaacagccccaagcaacttagatatggcgacatcatcaagaggctcaacaatggaaagtatttccttacagcgagtgttgtcaacagtacatccataacccaactcagctacaatgtcagccatgcttatttctttcccgatttcagacagaagtgactcaaaatcatcatttgtgctacccaagtacatatccaaatgtctacatggcacaaaaaaagagggggagcatttgtgaataaataggaatgaagaagtacacatattcagaatttgattagtcagaaactgaataccttgaaagatttggttgtctatcaaaatctccattagtgacaggtgcaaaaaacggcctctctgtgacttttagtagagatacaacattatttaaagtgtccagatgcttcaacaggccatcatactgatgcagaaacacgacaatttcatgaatttgatcatttgatacagattggataggattcatgcacagctcttcaatttgagcaattgaaaaccattgccctggaacaagaggcaatgtcaatgatcatctgaaaataagagaagcggatatgatatcactagactcacagagaaatgtctacctttctgctttatctctgagttctcagaatctgagagcgcaagcccaacaccaattttctcggcaactgagagttccagcagatttgacagactttcaagaaaatcatccgtcaaggctattgttgtcagcacctcacaaaaactggttgtgaagcatgtcttgcgcaaacaatatctgaaaacatcagataaaagcctttgttgcaactgcaactggaggttcttgacctccccagcattcagcaacacttgattcagacatactcggagcaccaaaatgcatccatccaggccactgtcaactaactgaaaaggtggggaaaataattggaattagaaaacatcgagcagactcagtattcagtaattagaactaagatatgatcgaagccaaagaagaaactcattttatcaagcaagtaggtaaactgctctattttgcgaaactacagtaggtggttcaacgagaatttgaactaaaactgccaatgaaaagtcaccacgagctctgtgattgaggaaatgaaatagatcagctagtgaatggaatgagttttagctattcatacagagtttaagcgcggtcataagtccaaaaacccactaggtggttcaacgagaatttgaactaaaactgccaatgaaaaagtcaccacgagctctgtgattgaggaaatgaaatagatcagctagtgaagcgaatgagccttaactattcatacagagtttaagcgcggccataagtcccaaaaacccacttgtgttaacctaggtcgctagcgctgaacttgtggcctgcaactctaacaaatctaaactcagaatcgacaatcgtaccgttaaacgctaccatatcctaagctagggaggaattgaacgcgctcacaagaatgcaggcgacgcagcattggcgagaacgcactagaacccgcggatccagactgggaagctaagaatcgaagagagggaggggggcgtaacgctggcaggaagcgggagggtccagcagtacagatgggtacctggcagatctcgcgccgaatggagtcgaagttggagtccgtagcgcattcaaacaggaggcgcagctccgcagcgacatcggcactgacggggatcatctcgccggcggcgaggggcaggggcggggagcgct

SEQ ID NO: 335 - DNA, 586 bp, Zea mays
  source 1..586: mol_type = unassigned DNA
aaacataaaaagtgtattaggcatgagagtaatataatgagtgcaatttgggggaaggtttgagtgtttgaccctaaaccatcttgatttctcgttgctccaccactactttaagaaagggtaccttctccatattttctaaagttgtaacaacagagatatcagcaagaaaaatcatataaaaacaaaaatgagaaacaatgaaaaagataataacataaaccatagattgtctgatttgcttctcatatagtttccttagattagaaggttgaactatattatttgacgtcgtttagtagcttccataattgtctattcatcagacttgagcatgaagattttgagatttatgacatacatcatatctactactgaagaagacaagaagggtactctactgttcagcctctaatttgggcaacaattccttagtataaccactacaatattcaattgtgtcaacctttttatcaataagcataagtaaattagtcctattaatatgctttgtgcccttgtattactttcaaatttcaagtttacatatatgactttaacgcgacaatgcggacaattttctccc

SEQ ID NO: 336 - DNA, 511 bp, Zea mays
  source 1..511: mol_type = unassigned DNA
cggaatcacgtctctttttgccgcgcgtggcttgggccgcctctagccgactggccaccgccgcgaccagcgcctgcatggcagggagtctttgcaggccggcggcactggccccagcgtcgactccgtggcgcaacggtagcgcgtctgactccagatcagaaggttgcgtgttcaaatcacgtcggggtcagggccctcttttcgttttgcttgccctggccatcgcacgtatctgtgttaggtcgtcgattgcagaaggggtgagggagcgcgtggagcgaccgccacggccaccagcagcggtctgcccgccgccgcctcggtagcgcagtaggcagcgcgtcagtctcataatctgaaggccgtgagttcgatcctcacccggggcacaaccttttttccagaaggtcccccccgatgctgaccagccccgcgtgctgctgcggcgggtccggcgtcactcacagcccctatggctcagtggttagagcaccggtcttgtaaaccg

SEQ ID NO: 337 - DNA, 3730 bp, Zea mays
  source 1..3730: mol_type = unassigned DNA
gcatcagcagctgcacaacttttgcttttctaggcacttggtcttccatggcaggtgtaaccaatattctcggataaaggagtggcgtacaactaagacactgctttggcagtccttcattatgcatcaatcttttctttagaggggttattattattatgcattctccgttgcggatggttttttttttgggagttatctgttcagaagtaagcaatcagataatagcgtgacagatgaccacaaacacatctggcagcccaccgatgatactagggcttgcacgtactgtacatttttagggttttgtcctatttgtggcacgtctagcctaccctcgaacatacagaaaactttatgttctgtaccttggtctagtccctgccatccagtgtaccctctactccttcccagcctttagctttcttgtttgctaccttgagacttgagtcgtgagagatacgccaagcgaaaggacgagaccttgccggtctcaacagtgttgcgctcgtctgtgttgctgcccctgcccctaccgttggtcaaaaaggtaatccgtcgtcgtcgtctagtcgattcgcatccgcgttgctcgaatgccgcttaagtttccggaagatctcgtcgagtgattccgtagcggattcgttcgtcccggccctaggagacaggcccaataggaggaacttcctggagccgcccatggtcgctctgaggttctggaaacccgtcttcattgaggcccaccttgaggccgtctcagctggtgaatctgccgccgcactcacacaaggcggctcattggatttggaggtcgatgagatccccttctgaacctccactggtttcggactgctgcactgttccctcgccggagaatatctctgactctgagcgacatcgccaccgtgtttcggctgggcggcggttcgttccggctccgtctccactgtaccgtcaccctgtgcaaaaaacaagttaaagattagctgagagtggaacctccaaatggactagaagaaggactatgacgcagccagactaattcgcacctgtggtatgtttccagattcgacgtcttcgcctaaacagctgaagtttcttgctagtggagctgcatgctcactgactttgcgtccttgttccatggagcttctctctgcagaagaaagcaaataacatcagacagacgatacacagatagagcaagccggcgctggagcaaaatgacttctataaccaagctaagcagggtttctaataaaaccaccagcaacaagcttcacgttaccgaaaccactagcagggtttgattatttttttctctcaaaaccaagcagggtttggaatggtctgtgtaagcatgataagttgataggaaatgctgcgacggagattcagacacaaggtactgctcgtaacgaaattcttacctttctgaagaatgaatactccagacggatccaacccatccatatctccttcttggtcagtccagcacttgaaccttttcaagctcccaaaaaagtctatcagatgctcgaaaaaatttacagcgaccaatagggtataaacaaccataatgagtgggtagattttgttgaaggttctcccgaagaaaggcacgacgtcatcaatgtttcccattctctacatattagtataagaggtgatcagtcaagcagtcaacaactgggacatatcttgtaattgttaagattaaaaatgaaagaaaataacattctgcacttgcaatgaaaaaacgtgtcctctaaacattctttttagagaacttctatcttctgttggtatctttacggttgacctactgacttggagtaagggctgtattttaagtatttccttatacacaattaaggagatgaacttaattattttagagcactgattatatgaaagagcataaattttaataggggcctgtatttggcatgaaaactgtaaacttgcaatcaattagtgttttcctacttctctttcctggtgtgcacaaagatcatggtatttttttcctaaatatcaaaaaaaaatcatcattttccccctgagcaacccaacatcgattatgaaagtttgagatcaagaatgactactcaaatatcacatattgattttattcattgccaataatgtagtgaaaaaagtacaagcaaggaacatgcaaagaataccttttcaaaagtagttttagcattaccaccaaggtgaatgagattcaggaagttgtaagaaataggtggtgcatatcttgcaaccattctgcagtgaaacgtttgatgtaaaaattggattagaatgcaggaaggtgcctttaacgattaatgccattcaaagtatcaaaagatggaattctggatcgcttacgagcagatcataagcaagctgactgaactagtttgtcctggggtcaacgaatataacagcatcatccctatcctaatcagtgaatagtatgtgcagatgcacatatacatcaagggaacaaacgcagcaacctgttaataggcaagtctaatcagcaaaaggaataaggttaaacttattgttttggaaaaaattctttaatgaaattataccaagcagaaagaacaacagtatttataaaataaaaagaatggcaaggaaccacaatgtttgatcctctaccaaaaaaaacagattttgatgacccaccaggattttttttcacatgtgaaagcacaacagttgtgtatatcacgattgacgaataaaattgagaaacaaaggattaacaaaatctcatgcaaaagttatgtttatagaaacgtgtgtgggtgaaagtgagttccatgtgtatattttactccaaactaaaagccaatgataacaaggaaagctgcagcaactgagtggcaaatttcttacctggactaaaacttcttgctttcctgcatttataagattggagaaaagtgacagatcaacatcacttggcagcaaagtggcctcagccaacagtatggaagccgagacacatccaaggataacagcaagtactctcataaattgctttctcagtaaacagcgccaaatgaactctgaaaatgtcaatgtgcctttgaatcagtaccatgaattattgaaaattcagggtggtttgctcagaaccctatatgcattggatatgatacatgagtgttgtgtataacgtatcttcagcataaggtttactgtaaaattaggagtcatgaactaatctgaaattattgactatcagtacaacttgtagattcttgcaagacaccttcagctgttacgttatattgatagacacataagtttttattggagaaaattacctatagagtcaagaaaagaacccagtgtgcctgatcgactttccctgaaacttgacagatatttcctgtaaaagttaataatgaaatatccatgagatgcttgaaacagacctctcagaatatttcttctgacgataataagttgttaaccagcttgcaagacttggtgactgagacagttcggacaaaacataatgcacatatgctctcaccacaacagcagacatgccctttatcttttttcgaaagaatgtttaagaaacataaaaattggttatgctactaatgctagtttatactttgtattcatcaattatctgtcgattaaattaaacctaaaatcattatttcttctaacaacaaaaatgacaaataaacccccccccccc

SEQ ID NO: 338 - DNA, 2507 bp, Zea mays
  source 1..2507: mol_type = unassigned DNA
aaacatgtgccctgtgtggctagggttcccatgataacatggtttagcataagccccgatggtgatggcaacttgggctatctggacgggccagccagctggtgattggtgactgcatcctagcatatccgtccccagctgcatgatattctcaatttggtccttcagtatatattgcattagatgaagtctgatgtgctgacaatgtttctgcatatgagtgccaaataggcaatttcagtattgccgcagtataatgctcatttgcaattcagctataaatcaaacgctcacatgcttgtattatattcttcacttgttttgttttagttgaatcggttccaaactatacattattgtatggagaggctcagacacatttaaaactcgcatggaggaaactgctgattattatggtgctttcagccatcttttaagtttcagaaactacatttaccctatgctagttatcttatagaccaaaggcaacttttggccctgcttatcttgtttcagctactttttgcctatggtttatgagctgaaagttgtcccatgcagcatcagatgatgctcgaggaatctttggtggtaataagtatcattattatatgacggtatcatatcccgagagatcaaatgtggtcccattcaatgaacggttcatcttggcactctactaggtgaagagcctatcaagtttgttgaggatgagtttgatgttgagagggttgtcatttggcactaggtagcacaggttgggctctaaatccagagctgtttttggaaaggaaggtccaagctatctggtatcttctcttttgtttgttggcaactacaaatgaactcaaatattaggcattattgttactaattcagaaacaaatgtagtatagcactacacacagaaccacctttttgagtatcaaagctagggagaaaacgatgtcgaccgaagtactctgtgtcggattgactaccggccactagctgcatagccattctcatgcttctggtctctctcttttcagaacgaccgtgatccaaatagatctagaagtacgtaggtaaaccatcagcatcttgtgtaaaatagacgtggcaaatgtagatgatcagaagtggcagcgctcccgtttaaatcaacaggtgcctcattcctaatgtctcaaattcctgtctcatgtttttcttctttcatcttctttttcttgcttttgcagttctctctcatcaatttatttgtttatactaacacattcaccaaaaggagaggcagtgttgggtcgtgtgtggcttgtgcagacatgtgtgcggtgccatatttataatacatagtatccctataggttctattgattgatatgtttagggttttagggttatcagtactagttggaaaccacctatagtaccagattctcaaccattactagacatctaggatgaagtcaccaaactttagtggtggttacgtggcccgatattaaagaggtgcatttataactaatccgatccaagaaccattattaaaaggtcattctttactaccctaccggtactaaacatagatttttagtacttattcgtgccaagaattggtactaagtgtccaaaggctctttttattctatatatttataaagtgatatgtgcatgtctatatgtgtatattgaaaaaataatatatacacacgcattaattgatatgtgtacaataatatatatacaaatcaatagtaatagtgatacatacaaatatacaagtaacccatttgggcggcatgcacagcagcatgagcgcgagccgttggcagcaacgattgccgaagatgaaatcaaattgctgctttacttcttcagatggctttcctagccgaggtgagatcaggaggcgtgaagagcatgtgtgggacctcgcaactagcacaaggaggcgcgtgcgagtgtaagcacacgcacaacatgtttttgcagatgtctaactaatgacactggataaaaaaatattagaaaaactgttttgccaaacgatttacaaaaaaacaatgaccgaggctatttttggaggagccgaagctctaccaaacatgttctaaatatatctttatttctatattctcaatctgcatcatctttgtcttttgatggggagattttgtccatcttaatataactccgtgtttttataagatctcgttattttatgaaccccataacttgttttgaatcgactggatcttttcaaaagggaatagtacttccatcatatattcatctttatcaactgttatttaccaaaagcattaatataaagtattattagatccttgggacttggtagtataggttggcctctaaacatcgaagctggttttagaaagaaagattcaaactgtctcgtatctcctcttctgtgtgtgttggccctacttgaattaaaatcttagcaagttgtgtactgttcgtctcaatatgtcatcgtgttgtcctggcaggcattgctg

SEQ ID NO: 339 - DNA, 553 bp, Zea mays
  source 1..553: mol_type = unassigned DNA
tgtaatattttttcggtatattttggactaaaacaaaaaatataactgaaattatatggatcatgttctaggccatggacatttagtacgtgtgggaactgtatagctttttgactagatgaaactgctaccacattatcgtcgctaacaacatgacagatagaacttgagcagaatatcatagataaaaatacgtgaaagaataatattagtaagatatgtatacgacatggtattgttgccaattcataaacaagcaagagtagcgtagctctatgcagttttgatcacgaagatggtggatcactctacgttgtcactttcaacatttgatatacaatgacgcttgtcgtgggacactcaacaaaacagtgtagaccagagtgtgcacgatagacaatggtccagttagctaccgatcgctggccctataattatttctcaagctcttgatctctccaactagctcttatagtgtcgaccatgatccgaaaagacctggcggtggacagggaaaccatttgcaacttgagtaaaatagttgtgtccgatg

SEQ ID NO: 340 - DNA, 2472 bp, Zea mays
  source 1..2472: mol_type = unassigned DNA
cccccccccccccccctcattatcttccgatatagagccagcagagctcctgttaatctttgggggaaaagttgttaacttgtttatcttttatgtattttgttgacatgtctactgactacgattaggcaccacatccgtctccacaagtggctgttcgttcttcattgcacactaatctgtcatacaacaacagagtttcaaatgttggatctgacctttgtgagatgcagtcaactgagattacccaaccatatgaaagaaccagtagctgtgctaatcaaagggtgagtcccatgagtcagcagaacacaagtaaagcaaaaatgccaataggttcaatgcctccagaaataattgtaaaatcatatacatcaaggcttcttgtcggcaacccagatggtaaaatagtcattaggtctgatcaatataacagacatgatttccctgtggtgtatccaaatgcaaaattctttgtgatgaagtcctatgacgaggcagatattcacaaatctatcaagtatggtgtgtggtcaacttcctctgttggaaaccagaagttggatattgcattcagagaggctcaagctatatctgcaagtagttgtaccttgtgcccagttttccttttcttttcggtgagttgatcttaattttaaggtatttgacctctttcattaaattccatgttgttgaacttgaattactgagtccaaaattatggtcagcaggtcaatgaaagtttccatttctgtggtgttgctgagatggttggccctattgactaccaaaatgacatggacttttggtgcatggataaatggactggcagcttccctgtaaagtggcacattataaaaaacgtacataactccactttccgaagtatcttactgcagaacaatgaagataagcctgtaacctctagcagagatacacaagaggcgagctctctttgatatttcactaaatttcttacagttggaagaatattgtttcactgtttatgattggtttctttaattaaaggaaaatatgtatatgttcagttctctggttctatgatattttgatatagaccctaaatattgattccacataaatgggtcacataaatctaaggtactaccgtactagtaagttttgtttctttggatgaaactggcctagcaatagccagtaggttttatccatttgcagtattttgctgttgcacctttgacaacattgtaccttgatctgctgtttatcttgtgatctcatcctgcactctgacattgttccatacttgcatttgcagatacactacactcctggaacaactatgctcgaactcttcaaatataccagagcagacggctgtgtgcttgatagcttcatgttgcacgaggagaaggaagcaagtagtagacaactccaaaagtttaagctgcgcaggggtgctccacattttatacctgcatggcatggccctcgtccctacagacatgtgctgccaaaatctgacagtgtagtgatggggaaaattaccactgactttgagaccagcaatctggctaacaagctacagaatctcaacctggagaagaaccaggcttcatggcaagacttcaggcacctgactagcatagcttccaccaaaaagaggcagaaagactgttatccctatggaacccgggctcatggcaggagaaacaaggatattgtgaaggcataccatcccatggctcctaacaagaaatctgctttggatgaagaacatcgatactggaagaaaaaaccacaaccaggaaccgtagccagcgtctcatcaaaagcaccacctgaggagcatcagcaaggagttaaaaataccgatgcgcacagtgcattagtagctcctgagatgacttgtgaagagcaaaagattgtcgggaaagcctgtccacctgcggtcgtttcgacaacgagtaaagcctgctcagaactcctgcctggtgtggttgctattggctcaatgctgatcccgattacgatgcccaattagtagttccaaaggcatctcttgttgacctgcacgagtcaaggcctctcttgtaaatgcacgattccattttgagctcttctgactctatggtctcgtggcaaccatggagcaagccgtcttcactttaatctggcaaactagaaatcgcttataggttcaggttgtcttttcaccttttctgcgtccttgcttatgaatcttcagttgccaggtctgaactttttggttaccctagtctctggaatgggaaataaaaatacaggctgtggtgatgcgcttaaaacttctgttgaggtgggtagcagagtaagtcgcatgttatgctgaaatgatttctttgttgaaagcgtatgctgtatatatcaagtacatctttgttcgcatactctgttgttaaagctagacatgtcccgatcgtgcattgattaagggtgtgcattgggtaa

SEQ ID NO: 341 - DNA, 1234 bp, Zea mays
  source 1..1234: mol_type = unassigned DNA
caatataattgatttgttgaaggaagctcaatctcttacatgccagtttgatgtgttaagtcgttttgttggtaggctcgctcaaccacctcatagttatgcacttttcaagcatcaggtaacggttctatatgcacctccattgttatcaaatgacttgcttcagcaactggaccagcctcgaactggcggcattcaggcacggagatcccaaacctatggatttatggaatgaagaaacaatttgaagattctgacttttagtagtacattgatcggcggaacaagagcatcgatccgtccatgcgatcgaagcatccaaattattttgtctttcttgaaggcgatgacgaagcgtgagagcgacgtccactagggtagtcgagcacgcacgcaggcattattaattgggttgcggtccggcaccgggcggcggcggcggcgtctcccactctctgctctattcgcgcgcgaatcgcgatgacttgactagggtctcgttttctccctgctccgacggatcgaggataaggtatttttccagtgcaaatgcaaaaaggcagaagcgggaacagcttcggaggaggctttcagttcagctcctcaaccgagacagtagccggcgtccatgggaaagagtgtgcctgtatggccggcgtccatgggaaagaggcttcgcaggaggaggatgcatgacgagttgacgacggggaagatggaaagcgtcgccgaccgacggagccagcggagttatccgggccggggcgaaggcttcggcgctgggccagacgccatgagccgtcgctttctctcgtgggccgttgggtccagccacgcatgccgcctcgtttccagtaggtgcggcgcattgttagtttaccgtttcatcttccaaactggcatacttgtgtccctgctttttaattgtccgctttaatcgcgtaatgaatcctactccacagaaagggtgtcatctagacatctacccatacccgtattatctctacactttatgaagtggagtttcgaagaattaatatgtctacaatgaggattaattaaactaatctaaaatttcttgtaataattaaattctatataatagcttactttatccctcggtgtctagtagcgagaaaaaaagttaacacccaaagttcaaactctattatatcatagtatttctgataatctaaatataagagtctaattacataaacgtaaatattcaaaa

SEQ ID NO: 342 - DNA, 1833 bp, Zea mays
  source 1..1833: mol_type = unassigned DNA
cgattaaaactcttcttagtcaaaattaaatagaaaataatttaatactcctcgatctccaacccaacacagccattggtagccaggatcaactctaacgcacacatccacgaaacccgcgcacatctcaacgaagagaagcgttttttttattcctgtttaatgcaatgtaataacaagtcttatgtacagttgcaggctacaggcctactcccactgaaaagaatcgccaccgaaccatcacgactctgccaccgccagcgccacagccaccacgttctgcccggcatccagttcttctgacaccgcgttctggtcgatgaagttgaacagcgcgagccccgcggcccacacgtcgttgtccatcaccgactcctccggcgagtggctgatgccgccgcggcaccgcacgaacagcatcccgatctgcgaccacacaatccggagcgtgagcgagctgagcttcactattcagcacactagtcaccgccaacctcacattcgttcgcacgcatgcttcgtcttcttaccttggtgagcctggccatcgccatcgcgtcgtgccctgcgccgctcatcagcacgggcgtctcgccggccgccacggtgcgccccggcattgccgacacggtcgaccgcgccgcgcgcttcagctgagacgttaactccgggtcgcagtgcgtcgctgccgccgagtgctggtgcaagcgacatcaaggtcagactcagttcggcagcacaaactctacaccggcagatatcatgagccatgacaccaagagtgctgattcggtgctcctcctcaccttatgctcgaccttgcaatcgaccagtctgtcatcgcatttctggagaacaagcctcgagaagctcgtcacgatcgtctccctcacttggtcgtccatcgcgcggatgtccaccgtgaagtttacctgtcgtgggcacagctccaaggttcagctgactgatctgagccaccagttcatcagcagggccaagaagagtagtgcttggcaagcttacctggcccggaatcacgttgctcgcgcttggccacgtgttcagctcgccgacggtgcacaccaggccggccagggactcctcagtgaagcagctgcactcctcgtcgtaggtcagcaaactgttgggctctttacagaggcgttccagagtcacaacgagctctgcagctgcaaccatcggatcacggcgcaatttcattggaactgtgccagcatgcccttgcgaaccatctactattacctaggcaaacaaaaacaaagactaagcgctgtaactactttccttctcactcgaaagcttggtatacaaagggacttggaagcaacccagaattattaatgacagttgtcgtgggcagcttgagtatttaaatgtcaatgttaaactgaacaatcttggtgacagcaatgcctgtcttcctgaacattaattaactaagacttgttcttgcatcaaagatgacacatgacataggtgtgccaattattgaatgagatggatgttgactaataccccaggtgtttctctgattgattgtttatccattacatgcacatacttggttaacttaatattgaccactcataccctttgctaagagaacactcctatctagaattatttgattgcttacctgttgactgctatactgtcaccttatggttatctaatataaccggtacttcttttttctcagacacatatagtaggctctgatattgattgttttataaggaaagaatgaccttacggtaggaagccatgcagctagaccatattttagttttgtaaatgtagttcttgaataga

SEQ ID NO: 343 - DNA, 768 bp, Zea mays
  source 1..768: mol_type = unassigned DNA
tacttgtaaaattgattcaggtagtgtaccagctacagcagcgcttcccagaaaagttgtctggaatctgatgccctcctcatcgctgaatgcaatgacctaagcttcaaaaaggaaaaatgagtgctaggctccgccatgatgatttttccaggtgacgataatgcaatctaactaatgctgattcataatttgataaaaaaaataatcttcaagccactttggattagagcgttgaagccatacagtgaagaataaaccatgatttggttcacaccaaaacatgccgaccttgatctatagatgatatctagacatttgtttactgaaatgcatgacacaacctgacaacttgtgcattttgattatcaggattgccagaataacaaaagatgaaccgtgcacagaatcttttcaagatctgtaggaggtacgtcgaactgattaaaggggcattataaaactagattcctccaggtttctatagtctttcctgattatattatgatagtaataaagaacctactaggtaccttgcagcttagctatccaatcagcatcaaaagtacaatatataattaaaactgagtaaaatataataactctatgcctgctactggcaataaaacaatgtgaaatattccaatcaaacaaataaaagagtagatggacacaaacaagatcaatgcagacaagtgcgggtctacaagacgtatgtggctcataacgccacttgtagagagcgagaatagtggacaagttgtcgcg

SEQ ID NO: 344 - DNA, 964 bp, Zea mays
  source 1..964: mol_type = unassigned DNA
gaaagtattgtcaaaataattttaaacattgtgaaagtaatttgaattcataaaaacacgtaaagtatagaaattgtgcaaaattacactctgaacaggggcattagcgcattatcccttgctttttttaccaagacttaacaccgttaagtacaactaaacgtgttatggctatacaacattttgttttgaaaaacaggagcaaacacgcaaagtctaaataaacagaacaaatctgcagttacaccttaaacaggtgcgataacgcaattgccctagtaataaaactatgcatatttgccaaaaaaggcagaatagtagaataacaaaacaatgtacacagtaacaagtaacaaaaatttatactaactgttaaaaaggggaaaaatgtaaatttccaacggcaaaaacatctcgcctctggaagctccaactccaggttgcttgaactgtctgtaattcttgtatacctgtcctgtatacaaacttgtatactgccgtcccgggaagggagtaaagaaaggaggggaaaactaacatcagggactgaccgttacatcgacgatgacctataactataagttatactgtgggaccgactcttcttttttgctctaccaccgcagccgcactctgcatcctccggtgaaggggccgcaaggatgggggatcttattatacacgaaacaaatcaataaataatggaatggcgcgggggaattacaggatgaacaagaacaatgtggtgttggtgatggactgatggtgcttggtggactggtaaggaggaggtgatggtgacagtgtgcgtgatgcttcgcttttttttttttgggttcgaacgcgtatacgtacggtttgagaagtgtgccgcccgcgcgcctattgaaccatggcaaggaaggcgctggtcggagccgaagtcggcaccgctggtgcaggcgtcgtcgctggcggtgctggt

SEQ ID NO: 345 - DNA, 1288 bp, Zea mays
  source 1..1288: mol_type = unassigned DNA
ctgtactgcattttgccgtcgtcctcgccttcctccccgtcgtcggtgtactcgtcgctgtccgtttcgtcctccgtggtgaactcccgaggcgggtgctcgcttaacatcctggtgatgtcttctggcttcacagcaagcacatatccggtcagcctgcgcgcgtcggtctatccagcacgaaacgaaacgacaaaaggggacgaatgaagaaacaggttggcgcgcacggtgtcgttaccttcttcatgccggtgtcggtgccgaaagcggcgagcgtcgtcgtcggcgctgtctcgccattgctggtcggcggcacctgcgtgcctccacctgatcccccgttgttcctcttgtcgtcgttgatgttcttcccttctatctcgtgccggctcgagttcagctgatctaggtaggcgggagcaggaggagcggcagcggcggcgccgccgctgcggaggtgcttcctgccgatgtagatggcctcgagctggtggaagtacgggcaggtcttggagtcctcgggccgcttcttgttgctctccttcaccttcttgtagtacttgttgatgttctcccacttctccttgcaccgcttcgagctccggttgtaccccagccgccgcatcccggacgaaatgtcctcccagagcggacccttggcacccgtctccaggtagcgcatgtccaggtccatgcgaagctggatgagcgcgtccacctccgtcttgggccaccgcgatgacgacgccgcccttcctagccccgactcgacgtgatggtcggcgacgggcaccagctcgagtgacgggccagaggtcgcgggcgcgctgcgcggcgtgccggcgtcctgctgcgacgcatccttgggctgctgttgtgtcgggtgctgctggagcggcgcggctgagattggcttcggctgcggtgtcgcctgtggcgacggcggttgctgctgacgagaaggttgttttggcggcggcgtggtatgggcagcaggcaccggcgctggcattgggacgacaacggcggtagggggctgcacggactgcccgccgatgcgctggaggaaggcgatgatggcggcgtccctggaggccgcggcggcgcgctcctgagcgagctgctcctgctcgtggttgaggcgggcaacctcctgcctgcgacacgcctcctcccgcgccgtgcgctccgtctccactctccagcgtctccatggtctccaggaaccgccgctgcatttcctcctgcctgtcgacgacctgctgcatgagcccctcgaagaaag

SEQ ID NO: 346 - DNA, 1448 bp, Zea mays
  source 1..1448: mol_type = unassigned DNA
cgcttgccgaggcggtcatggcttccgcctgtctccgccgtcatgtcatctccctcggactccgattccgacatggaagagaagctgaagccttgcagcaggttgaggggctggtgggccccgggcagctccacgagtgtctggacctgccccgccggtgccgccgacgatatgggcgctggctgcatcggccccgtcggcggtggcattgaacttatcggcggcggcgcggatactggcgcggcgaaggcgtgcaacggtggagcggtggtgctcgctggcggcaactgctgctgctgcttctgtagcggcggctgtggctgcggcgcggctgcgtgcaaggcctccagctcgtcgaagaagcggtagctcttgccgtcctgcctgccggtgcggccttcctttgtgcgcttgtagtacttgtgcacgttctcgaacttctccttgcacttcttggcgcttctcttgtagcccaggtcggcgagcttcctgaaagccacagcagtgacaaaaaaagaattgagtgatcggcgaggaagaagaatttaagtactgacggcagcgtttacaggaggaagagtggcattacacatatggaggaaagagacaagaggatggaaagaattggaaatttgtaaaaggacaggcaagactgatgaggagcgaaagcgggccgaaggaggtagaggagggacagtcagtatgctgcagaatggaattctatatagctctcatcacagaccatagcgtctttttagggatcagaggggatgtgaagttgatgatcgatgcactagtgaatgaatactggagtgatgagggggaaaaactggagcgaaggagagagagagaaaaaagaggtcgcattgggatgggagagaaaggctggcctccttgtttacccaaaatctggagccatgaaagcagaaaacagtggcagactgcatgcagcggcggcagcagctagccagctactagctgcttgtctgcctgtactcgcacaccgtggtacgatacgatccccaggcgtccaaattcttcacccctactgctggctggcttggctgctgccatccaattctctctcttcactctgcctccccctccctcctcttccctctcgctgaaatcgaggagcatttgattagtactagatcgggacggaaacgggaaaacaaagcaagattcgaggggaattgggcgcgcagcgacgcatgattaattatccatcatttcatgtgggggcgtctgctgaattccacgaaaccgttagcgctttcccgcaggggaaaaaatcatgccggaggcaggcttgttgagcgtgagccggactgcaaatgcgtttggattccgtctctctctctctctctcccgggtctctcactcactccttttacctggagacgtcctcccacaggtggcccttgagcgtcgcgtcgcggaaggtg

SEQ ID NO: 347 - DNA, 999 bp, Zea mays
  source 1..999: mol_type = unassigned DNA
tattattattaaagagtaaagatataaagatatctgaggcacacaaaccaaaaacaacgacatatgagcttggatttcgaacactaactgcgaaaaggattagctacgagccatacaacattcaacaacacgtactaatgtctagcctccaaaaccagaatggatattatatcacgcccaacgccttcctccgatacgccttgcaagttgtatgtccttgtgcactgcagcagcaggaaggaaaacatttagggtaacacatttcctatagatccttgaatttatcaatcaatgtttgcgtttgtataaagctgaactaaattcagcaccagtagagattttttatcccactctctaagtcgtaattgttataataatagttactatttgttgatgtctttgttgataatcaaaccatgtaactggttcctttgttgataattgatgtctttgttggtaatcaaaccatataaatggcctactaaaagttaacaattgcactatgcgctatttgaacgttaccattatatttccactcataacaaggcaattcgccacttgaaataatatctagattccatctgaagcagaatcactaaagaatcgtgtaataaccaaaatgcatcacacatatcattatattaggagtaataaatagtacagagtaaaaggaggagttcagtctgtgacaacttactgactgtgacacgcttggcatggatggcacacagattcgcaatttcaaacagttctatcaagtggaattctgctgcctgtagacaaggaggaaaaacaataaaagaatctaaatgaaatcaaacattaactgagacgtaagacatgtttcataactgacctcttgcagagcaaggagggcttctggggtatagcgctctaccttcccgtttgttaagaaattggttaactccctcacctgcatatatatatatttttttcagaagaataactttccatcagacagaatgcggaacaaaccca

SEQ ID NO: 348 - DNA, 586 bp, Zea mays; identical to SEQ ID NO: 335
  source 1..586: mol_type = unassigned DNA

SEQ ID NO: 349 - DNA, 1039 bp, Zea mays
  source 1..1039: mol_type = unassigned DNA
actgatgacttccatttttttctttacatgccaggcaatataccacaattactaagggcagtgcaattgcaaatatacaataagcagttaataatagtaacctctacctttcagtgtttgatgaaccacctagaggagtcgagtgcaaggtaaactcccggtcatacagtggaacagaaccatcatctactgtatcactttcccttgcttggttatccacccaaaaggacttgtcagaataagaaaaacaagaaaacaaaacaaagtgaataactatattccagttaagtatcccacaaaaagcagaaataaaccatagtacaatacagcaatttgtttaaagattacatgaaatgttagatgcatattatcaatcagtacagtaacaaagaacagaggactatgcccatgtcagaatatgtagcatagttgttaaggcggtaaggcgagataaggcggccgacccctttttaccttttaagcggtaaggcgtaaggcgtaaggcaaggcgacgcctaactaatatataaatataggaatatgatcttaaataggtagggatggtagtacaaataagggtacaagttcaacctaaaccaacataatagaattaaaatattaacataactaatagatagtagtagaagattaggaaaaaatgaatacataactgatagatttactggtttaatagagaagtaaaaagaagagaaaaaataagagtttaaagacatatgggccatcagactgctatttcccggcccagtcagcccacttattgacctaactccatccctcagctgcaccttgcagcagccttcagccgccaccctgcagttgccagagaggggagagggagtcgccgccagagagagaggagagtgagcaggggaggtcaccgcccgcacacctgagagagagagggagggagaggacgtgcgcgaccatctccgacccgcgcgacgctgccgcgacctacgccgaccagcgcaacgccgccgcaacctgcgccgacccacgggacgccacgtcttccccg

SEQ ID NO: 350 - DNA, 1730 bp, Zea mays
  source 1..1730: mol_type = unassigned DNA
atgccttaggctcccaggcaaggagacgcggacgccttatggccagagcacgccttagcatttaggtgtcgcctaagcatcgccttagggacgccttaacaactatgatatgtagtactaaaatgaggtgtttcaaatgaaaataataaaagcatatggctgcaagtgggaagtaacactgcattcagattccaaagtttatttctgttgaatacgaacacagttgtagcatatttgccattctgaacgcgtaagattgatttagtttccaacatgtcctcaaaggctaagcgtatctgaaggaagaggctaatgtcaccagataaatagaaaaatggaacaaggaccaaaacatggaagtccctactgcaaaattaaggcttacacatgggattatggggaaaaactattttcaaattagcacagttagatgcacatgcactatcatatgccaataaaggacatactcactttaccaggtaggtagctaagtcaagagtgatagcttaccaagaggcggtggaatacttttggcaatggaaagaaaaaaaacatttaaaacaaaaaaataggaaaatgaaaatagaaagcaacaatacattagagcatctccaagagtctctgcatggctatttatcacaaattacaaaatttcaaaaaaaatcaggttccaatagactttctaaccactctttcaactctccaaaaccactcttgttgctctgcactagcgaagaatctacatcactctttaaattccatatatagtagttctatcataaatttttgacacaaggaaagttactacaagtcattcgagtatagaactatagataatgaaattaagagagtccatgggaaataagagatacataaaagagaatattcatcggatggctctccaactagagataacagagatagaattttagagaagctctttgagttactattagttatcacatcaatcaatttgattttttatagtacctatagctaatttgacacatgttgcaagaaactagaacttccggggaccattccagaaacctacaacttcctcaccagaaacattgaaacatgagaccaccagtgacatgctacaggggctgacatgtgggttcacggttagaaagttatagtgatggtcttctgcaacaaggtgccaagaactcaaaataattgtaggtttctgcaatgagcaccagaagttgcttcctacaaatgtgtcaaagtagttgtcaatttttaaattttacttttaaagaaatcgttttagaaaaaagaacaaaatagacactaaaatgcatgcagtcttcataagtcaaaaagtatgaccacctctgtacatttagtttcttagattgcaaataattaagataggttttacgttaaagatggtgttaatgcccaactgtccaagtaacacccagctgaagccagagcataacgagaaaaagagaacacaagataaatcaccaatcatatattcaaagtaatcatataatattgtttctggacattgtcaggtcaacttcaacataatgacatacataccacggcacaagatttctcagaaccaacatgtaatgcaggataataagtctcttcaccactttctaaggtcacttccacagcttcctgttatttccagaaggaaaataaatgtcaagaaacttcaattatatcatttctaaataattctttctgaatgcaatatcttcttgtac

SEQ ID NO: 351 - DNA, 3203 bp, Zea mays
  source 1..3203: mol_type = unassigned DNA
taaaacagatttctaaatttacaaactcctgaccaaatctaatttgatccctacatttatcatcttgttgggactcttgaaataaatgtttttgctaagatattgcgataagcatactctgactacggtttcgccgtctctttatctgccaccgctagataacctcttgtgccaaggtgtcgctagagcacctcctgtgctgcctccatgccgtagttgcgagggcgtccgtggatagtgtgtgctgttgttgcaatcatctggtccatcgacaactccgacctcccaaaacgttaaggaaggttattggtataaatttatgccatcaactcgatttaaaatagaaagtatgtcttttttttacattgacaacttaaaaaattaccaaccaatgttggagcataaacattttttactcaagtgttatagtaactttctctataatttagaatgctaaatttacataacttggattgctttatgtttgtcttgaagtttgatcttcaacagcccagggatataccaaatttaaagaaagctccataaatggtgcagttggcccgttaagtcagttattatgcacccctactgatgatagaatttggcaaaggtcattgttgttagttgtaactgctcaacattaaacctaaattaaagcaagtattatttacaccaggaagttttggccatatccccacaaaaactcacagaagaaattaaaattctctatatacagaagaacaacaaaagctgaatcactagtactttcctctgtttcaaacttttcagtgtatgccaagagcctggaatctcctcactagagcaagattggtcgcgttcctcctctgccagtcctccgtgctctccttcctctgctccagcttgtccagcacgtcttcgttgccgtccagaatgctcgcgatcttcctcatgctcggccgcgccgccgggtctgaccgggtgcacgccatgccgagccgagccagccgcacgagctccctacggtcaaacttgccgtccagccgccggtccgccagggcctccaccggccggtcctgctgctcaaggagctggaccttcctaacgaggaggacctccggcagcctcccgtccacggccattgtgccggtcaccacctccagcaccaccacgccgaagctgtagacgtcggccatggtggtcgcctcgcccgtgtccatgtactccggcgacatgtagccgaagatgccccgggccgagctggcggtgaccaccacgtggtgcccgccgccgtggcgctcgttcctcgacaggaactcggcgagcgcgaagctcccgagccgcgggttcatgtcggggtccaggaacaccgccgacgacgtgatgctgcggtggatcacctgctcgtcccactcctcgtggaggtacaggacggccgacgccagcgccctgacgatgctgtaccgctgccgccacgggaggaccgcgccgcagtcgcgccgccggagcaggtggtggctcaggaggctccccggggagtagtcgtagacgacgagcatctcgccgtggtccgtgcaccacccgcgcagctgcacgaggttcctgtgccggagcttggccacgttgcatagctccctggcgaaccggacgcgcagcgccgggcacgtcttcatgccgaggcgcttcacgaggacgtggacgcggccgtggccggtgtccaggaagccctcgtaccctgtcccgaagtccagctccgcgaccacctgcgactcggagaagtcgttggtgatggcgacgatctccttgtagggtatctcgcgcggcgtgtccacgtgcgggatcgccacgggcgctagccgagacgacgaccgccggccggagtcagcggacgcggacctggaaccggtcgtcctcccgtcttccgcggtgtggtagatggtgtccgcggccgcggtgtcgtagacggggttggaattggttagagacgtcgccgccgtgctcctgtcggtggtgacggtcgtggcgccggagtcggaggccgacgacgaggtgagagagatgtacttggggagcgccacgaacgacggcagacgcgggaggtcgccagcagagcagccgtcggagaggttctctaccacccacctcatggtcggacgcgccctggggtcgtgcagcgagcagaggagaccgaggtgcatgagccgcgcgacgtcgaacagcgcagaggcgccgtccggcagcttcgcgtccgcggcgttgagcagcttgccctcgtccgacagccgccgcacccagtcgagcatgaagatctggtcgtcggggtacgccaggtcgacggcgcgccgccccgtggccacctccaggagcacgatgccgaagctgaagacgtcggacttggcggtgccgccggcggcccggcgatggaagctctcaggcggcaggtacccgatggtcccgccgatgcggctggtgtccatgagccggaattggtagttggccgagaccgcggccgaggcagatgacgacgacaggcgcagggacggtggcgacgcctccgggtgcagcgggttcagggcgtcgtcggcgcccaccgcgtgctcgagccagcgggcgaggccgaagtcgccgagccgtgcgttgtactcggagtcgagcatgacgttgctggtcttgacgtcgcggtggatgatctgcgtgtccagctgctcgtgaaggtagaagagcgcggcggcgagcccggcgacgatgcggcggcggcggtcccagctgagccgcggagccgaggccggggccgcggccttgggcggcgcgaagagcaggcggtcgaggctgcggttgggcatgtagtcgtagactagcatgagctcctccccggcgcgcacgcaccagccgcggaggcgcaccaggttgcgatgccgcagcctggccacggccgcgagctcggccaggaacgacttgtcgctgcgggcgcccgcgctgctggctgcgacgcacttgacggccaccgtggtgccgtcgctgggcagaacggcgcggtacacccggccgaatcccccgctgccgagtacctccgcgtcgctgaacccgcgcgtcccgatgtagagctccgagtagctgaatatcctgggcccgccgcccgcgagctgcttcctgccggcgacgtcgtcgaccacgccggcgatgtcctcgaacgccgccgccttttccgaagagtcgtcgtgcca

SEQ ID NO: 352 - DNA, 2458 bp, Zea mays
  source 1..2458: mol_type = unassigned DNA
gggggggggggggggtttcggcaggtaggtagagatagaggccatgcaaaacacagaaatagagacatccatgacaccatcgcgtggctacatctacaacattgtttacaccaaggcagacattatagccagatgggacgtcattgaccaataggggttgatagccataattcaatatgtgccacctgtcttaggcgaatagggtgaaaagagggcaactttattccaaataaggggtctgactcatggctcacgtagcttgatctggaaaggagtcagtttggcagggaatattcattcagcagatcatcaattaggcagaggagcttttctcagatggaacaatgtgagagactaaacttgtctgtgcagcaaaacagatttattgtatgcccacattcgcaagaaaatttgggtggaataaggttgtcctgcaaagcaagttttttgctaggcaaaacagtaaccagtaagtatcaagcaaaaccattgtagataagaaacttacagaccaaaatatcaaaaatgtcgctacagttttgagtttctagtagcttattctgttacatatttacatgacacaacaaagtcattacacatgctattgctacctcattcttagatgacaagttagtaacaagagatgtttggaactaactaaagatcaagggaagctaacaacaaaacgaagacatgtctaaaacaagaagcctcaaaatttagctctttaatggtcatatcaaatagaaaaacaaaagagaaaggtttaaccagatacatactgagcacattctgccaattttcctaggttctgattttccaaaatagccaaaataagctgcttattctcatccagatactgcagggaaaaaaacaggatcaatcagaaaagttacaaatgtgcaacagatcaaacataaaactgattaacctggaatagaaagccaaatgtgccatataaattaataaacattgatagtaagtcataaaattgcaatatagaagacaaggtagtcctgtgagaatacatggaaaatctagattatcacaagatatttataaatcaattgaatgagcatataaagaacaatacaagcatagctggtctggtgttagatgtaaagtatcaaagatcagttagagtctgtctagaactgtattcttgaactgcgaatgtttcggtccagtgggctacataaacatggggtcattgctatgttgaaacagataaggcccgtatttcactctatgtttttctagaaagaaccaacttggctacaatagtttggaattatgtaagtaaaacaaagataaacattcttcagcgcctatttataagcattatatgcattggcagtctacaactaacaaaattaatattagttactagaaaacttaagtacaaaattcagaaaaaaaaacagacaataagcacgaaatcaatatatgagagaccaaagaacaaattagcaaagctgtcactttttctttttaactgagcaacaagttgaagattaaaaataagaaagataacattacatctccaatgaaaacatattgaggcattcccataactgggtaaaaaaaattactactgctagttccagctataacttggaaggtatgtcaatcataaactcatgtcccgagtgtgtgtttgtaatccataaatatgccgctgattctccatatgagccacggcatcttccatcacaacaacaaaaaaattatgccatcaagagaagggaatgtacacacagagaaggattgcaggttacgaagtgaagagtgtcagcgtgaggtcaacaccacaaagcacatatggaaaacatcagtttccttttgttcgaagcaatgtgacataaggccatgctacaagaaaggactcaagtcccattacccaaaataaatgatacattgaaatgttgtgctcctatacataaatggtcatatccttcgtgtggtaaaatatttggtgcaccgccaccataagaagacaaatatattatcaacgaagcatcaggattcatgtctgatagtttaaaaaaataatccatgtctgagagcaggatcataacatcataccaaatatccaatagatcaacagaactcctacaccagcttcaggtgacgcttgtcaaatctaccaagaaatctagaaagaaacatactaatccactaatccgatacatcagtaatcgatcccagctcatacggatgaatgcattagattggactggcaagatgatccaatctttgaccgaaatggcgcccaagaaaaccccacacgaagcagggatgcgaaccctatcacaactgcgagggggaagtgagggagcaaagaggaaccttttggatctgctccgtgctgattccggcagctggggttatcgccggcgcctgtggctgcatgtgcatcggctgctgcatcccttcttctgctggctttggtatctcg

SEQ ID NO: 353 - DNA, 4600 bp, Zea mays
  source 1..4600: mol_type = unassigned DNA
caggcttcaaagttccaagctgtccaggtaatctgcggattatttatatcttaaagcatatttttggcctctaattttttatgcacaggctcggctttatgaagggaaagaaccaatacagttctttgtcatatttcaaagtcttcaagtgttcaaggtttgcttcgaattagcagtcaaaatccttaacatgttataaaaaatcttaatacttctatgttgaatgctctataagtttcctctctttctgaattttcaatatagggtggccttagctctggatacaagaactttattgctgaaaataatattttggatgacacttactctgaaggtgggattgccctatttcggattcaaggttcaggatcagaaaacatgcaagcaattcaagtagatacagtaagtttggggtcatactttggtttgtcaagatatttgtgagaacatcagtcttatcttcattaatgagcgtcttaatctttctcatctttttgttagctggcttcgtccttaaactcgtcctattgttacattctccacgatggaaacactgtgttcacatggactggcaatgttacgacctcattagatcatgacttggttgagaggcagctagatgtcattaaggtttcaatattctttctcatttgggtgaatacatcttcgtacaatacagatttcctgatgattagcaaattggcagtttggtatcaatgtaaaaccttgactaaattcccctacaaaggttttgcatgtttctgatagaaaatagtttgagtatgttatgcacaaagcaatgctcaatgacacttttattcatgtcacatgttagtatgtagtctaactgctaaagaaaacaaaagaaatgcatgtgagagttaattatttgatttctatgatgatgatataagtctgatagttatcaatggttactagtattggaccagcatattcttggtcttgcggcaacttatatttttcttttgcaatttagtaaaagaaaattagccatgcacatgaatgtagtgcaaatcgatatgactaatagttacttggtttagttgtttgttacaaatgtgtttcatgttgtaaatgtatatcatgttgagtttctttagtatgttttagttgtgctagattttggtccatttgtgtttgttggattgtatgatggcaacaaaacaacgtataggtcttcctctagactcatatttagtatagattggatgtttataccctgttacattgtcattgttgatgctgaatccgaccaacacaatagtaggggctagatcgcccgaggctgcatatagcctagatacatagttcagttgggtctaaatggcaaggctgatgtgcaagtcaacaaggccgatttgacacttcttcacccgaaaaacccatgaacaactcctagaaagacacgttcgagagacacacatcaggggtgtcctaggatcgacaaggctatctagaatgccatcgagtcttgttgagagacgctcaatagcgagaggttggaagaggtaaaaagtagtagattgatttttgatcaattgtgtagtcgaatacctcaatcggacctgatcctatgatatatgtaaagggtgtggtcttatcccagtaggaaattttcccaagacatattctacaatttatccacgagattagaggagtttgggttagaattacgagaagtggactcgaacagggcacgtcggaacttggaacttttgttgaatgttggaacttccaatgcccaactcccgaacccaggagccttgcaagttagaactttcctctgaccccttttgctatcaactgtcaccctccttgtttttatgtggttttaaacgtaatggtaggaactctgcatttcactcgagaagaaatagaattacctttcgcttgtatgttttttgacaggtacattagtcgtctattttctgcttatttggctccaacatgtttttcctaagttttaactctttttgtgcttctattttttattgtacagccagatctaccttccaggtcacaaaaggaggggagagaaaccgaccaattctggaaactactgggtggtaaatccaagtatccaaaccaaaaaattgaaagagaaaatgaaagtgatccccatcttttctcgtgcatcatatccaaaggtaactacaaacaaggattttctaagttgaatgcactgttcaacatatactgacacttctcttctttggctactaatgttgttgttgggggttgtgaaggcaatttaagggtaaggaaaacaaagatgacatggttttattgctaagtgctttcttgatttcatgtctaatacaaacattatttttaaaatgtatatcaggttaaagaaatacaccactttactcaggatgatcttatgacagaggatgtttttgttattgattgtcactcagacatatttgtttgggttggccaggaggtggatgccaaagtgaaatcacaagctatggatattggagaggttaaaccaaaattatcctctataaattagaaatcatgatttttatttatttctcactttctttctcactataactgctagaaatttattgttcatgattttcttatggaaaaactatcacgagaaacaccaatattcattgtgtcagaaggcagcgagccacaattttttactagattcttcaattgggactctgcaaaatctcatgtaagtagtttgtgtcctgcacttgcttattgtgaattaacaccaattctattccatgagatttttacacctatgtatgcatgcctggtatttagcattggaaattaaattcatctttgcacttctgaatttttgttgcagatgcatggcagttcataccagaggaagcttgctatcctaaagggtggattacctccatcactagaagtaagtctcaaacaaatgatttttctagtagctcggtggaaatcatcttctacccgctttttgtgaatttagtatagtttctatccaagtatgtggttgcaaatcaacttttggttcatgatatgcatgtttgttgatactcttgctttctcgacattgttaacttcttgtgcgggtatatagatgatcacaaatttaggttttcagtattttaattaggaatactatgtcatttttatgattgagcctcaacatatatatatgttgaccataaggtttcagagaaggaacatagggtggctaaactagcgtctaagttgaagtcttgctatctaaaagcagctctcttactatctccatgttttcagaaaccaaagcgacgaacaccagcatttacgggaagaggttttggacaagataaatctcagcgttcaagaagcatgtccactagtccggatcgtccacgtgttcggggaaggtctccagccttcaatatgttaacttctgcctttgagaacacaagcaatatcaggaacctttccacccctcctccagctgtgaaaaagcttttcccaaaatctggaggtcctgaacactcaagggtatcacccaaaaaatcagctatcagtgccctcaccagctcttttgaagcacccctaaaaagtacaataccaaaatcggtaaaaggtataatgaatacaactcttcaaatatgatagagcacgggtagcaaaagttctagttcttatatatcttgtttctttttttgcaaaactaagcgagccctgagccagagaaggcgatacaggagcaaggtgtcgtaggcggtgcaagtgaaaacaaactagaagacgacgaaggccgcacgatctacccatatgaacgtctaacaaccacagctgaagatccttcccctgacattgatttaaccaaacgagaggtaacaaactaatcttcctccttccattcatacatgtttgttagatcaattgatgattccatttactgttatcaactaaatgcagtcctacttatcgtctgttgagttcaaagacaaattcaacatgacaagggcggtgttctacaagctccctaagtggaagcagaacaagttgaaatctgatgtccagcttttttagtcttcccatggtcgtcttgaattttgactcctgaagacagtaactgtttgtgaggaggaaagacaccaattttcatgtttagagctcctatcttcacctagttagggtttgtttggattctttcttctaaaatttagagctctaaactttagagataaagatctaaataaatgatctaataaagttagctctaaaatatagctcacctcatattagagctttagagctcaaaagtgagttagctaaagtatctaaagcttttagagctctaaaatttagaggggatctaaacagggccatagcctattctttgtgaaagtacttgttctttccatttataggatctaagatccaatcagagatcaagaggattggaattccatagctcacttgagttgtgggggtctttggattttggatcacgtgttgatgttttttctagtttggccaacgtttgtgttatgggattcagatcgcaaaaggttgccacgattagatatacttgtactttctcgcaatacaacaacaatgcatgtac

SEQ ID NO: 354 - DNA, 1230 bp, Zea mays
  source 1..1230: mol_type = unassigned DNA
gagtcaatgcactgttcaggactcgtcgcttttcctaaacacatgctcagactatattttgtgcgtcacaacttccacatcccattataaaagaatttccccatgacacttggtcttgtttgagctgtccattcacactcccacttttccatagaacatcacatttgtcacgatatctctcgaagcactttctaacctcatcttctcctctgacgccagattcccaaactacaatcatggttgcctctcattcgcatgaatttgaggtcgccataattaagtccaaggcccttaaatctttggtcatgattgaattacttcaagagaaaatataatccagtggaaaattacaggtaaagaaacctatcccatgactaatgctgacgagatcaccatcttttcttccttcttgatgcaaggatttagtctccctcttctcaattcttctgggatttgctccattattatcaaatcgagcttgttcatctcaaccctattctattctgcacatcaccatcttcgcgcacctttgtgaggcatatttggaaattccttctgtctttcccccttttagtatcttttctttcgctggccttgtcccagcaaagaacatctagctatagttgggattaagcttcgtgctaacaactaatacctcaactgtcctttgaaacctcccataaatactagcacaaacttttgttttatgttgaaaatcacgcccccaaaccacccgagttccttggaaaacaccctattccttgacttgagtagatgagtgacccactatccaagcacatcgatgccatctctgctacgatgagcaaaccaggagttgagagccctcgtcctctcgatggtgcatgtggtagggagctggacctagcgatgagcccccctccatgagaaagcaaactttgcatgtgaatatgatagagagactaatccctatcaatcaagagttcaaaccatcattatgccaaaggcggaggactagcttcaccagggattctcacccatcgaagactgaccaaaaggttgattgacaaaggcatattctatacttaagccatgacccaaggtactttaaggactatgccacttatcatttttttctgatcttgtttaactctgtcataatcattcctcacacttttaaatgctaaaacattatttgcttttacataaatttacttgggcaccaatagatgatgaggaacctgactcgag

SEQ ID NO: 355 - DNA, 957 bp, Zea mays
  source 1..957: mol_type = unassigned DNA
atcctatatttggcatttagatcaggaccctctcggtgacttagaaccggtgacagcgatgacccacataacccttcagccataggtgtcgccgagccagaggtctatgatgaatcgacctctaagaccgagacccaaaggtgctcctctactccaccaaaaaaatttcaaagaaattgcatgactaagattgtgaagcttcccacaaacggctgatgcaagactatttcaacgacccatgtgtctatcccctactctactttcgtcaaaggcaccacatgcgaaggagtctttttttcttcaaattttaaagaggttgggtaagcattccccctattttactatttgggtcatgtcactcaaccgcaatggtttgtcccctcacaaaaaatgcactgcttccctccacatgcttgcctatggtagcattgctgactacattgatgagtatatcaaaatagggaaaagctctcccttaaactaccttgaatatttctataagggtgtcatttcatgttttggtgaggagcatagttgttgtcatactactgatgatcttaggcgtattttagttaaaggagaagagagctaatttcctagtatgatagagagtatatattacttgcaagaaattggaggaactgtcccattgaatgaaaaagggtagtttactacgagaaattggatctccaaccatcatgctcgaatattgactccaacaaacctacaagcgatctgcaatcatcgcgtgaactacacagataggcgaatcattagggaagcgaggccatatcgaccgaactagcaaagtttgcgatcgagaactcaggttgaaaaggaggatctagggcttcagcatgagcttggatgaatctcgattgtatggagccccacggtgcctgcagatgaagctcgcacacaatgacatcgtcggtgaggaggacagaccgtggacga

SEQ ID NO: 356 - DNA, 1610 bp, Zea mays
  source 1..1610: mol_type = unassigned DNA
acagaatttgatctcaacctacctgtggatgagtttggtgcagtcaatttcgacttcgttcaaaacatgacaggtaaagaacatgtccaagtttgttttgcagacttctacagctcgcacacttgctcatgtccatgtttgttttgcagaacatgttgttgaggctccagttccggtgaggcaccgacgtaaagagatggaagaagctatcagaaaacaagtttatcaagcattgttggctagaagcaataatgggacactccacaagaaagatacccaaattgtcgcagatcaatttgatcttcatattaggtcagttcaacgcatatggaagagaggtaaaatacaacttgcaaactctatcccggttgtggtctctagtctaaaaaagggatgagttggtcgtaaggcaattcctattgatttggaagttttgcgtaacattcctctaaaggataggatgacattagaggatgtttgtgccaaacttgacataagcaaatggaaggtgctaaggtatttaaaaagagggttgcttaggcgtcattccagtactatcaagccttatctcacagatgttaacaaaaagactagattgaagtggtgtattgacatggttaataggccggtgaatggtgatccaaggtttagggatttttttgacattgtctccatcgatgaaaaatggttctacttaaaccagaagtctgaaaggttttatttgctccccgacgaagatgatccacataggactgcaaagaacaaaaactacatccctaggcttatgtttttgtgtgttgttgctcggccgagatttagacatggagagtgcatttttgatggcaagattggttgttttcctctagtcacgtatgaaccggctataagaagtaatgcaataactggccgtgtacggggagatatggttatgaagcctattcaaagtatcacaagagatgtcgttaggggattcatgattaatcaagtcttgccggccattagagccaagtggccaagagaagatgtgggcaatcctatttatattcaacaagacaatgcaccttcacatctaaagttagatgatcctttgttttgtgaggctgcaaagcaagatgggtttgatattcgcctcatatgtcaacctccaaattcacctgattttaacattttggatttgggattttttcgagctattcaaagtatccaatacaaaaagaatgcaaaaactctcgaacagctacttccagcagtacaacaggtattgtgttcacacattctttctcaaattgttcacacattcttcatcattcaacaactaatttcatcactgtttttcctctaggccttcatggagttctgtcctcgtaaagcaaatcgcatctttgtaacactacaaactgttttattggaatcaatgaagaagaaaggttgcaacaactacaaaattccacacatgaataaggaaacattagaaagacaagagagactgccaacttgtattccttgtccgccatcgttgctacatgatgctgaggctacacttgctgtgttgtaacatgaacatttcaatattaccgtgaacttaccgatgttttggcgtcgcactcggg

SEQ ID NO: 357 - DNA, 4453 bp, Zea mays
  source 1..4453: mol_type = unassigned DNA
tactcctcagcgcctcggcaggtgtcgtcgggcccgaccccagcggaggttgaggcgatgaggcgccaggtggagaggaaggtggttatggacgagacgcaggcgcagcggtgccagggctcgtcgtcctcgcaagcaccggcgccgagaccagcaatgcaagataaggcgcccggtccgttggcacccgcagggagcccgttgtcgatcccagcgcagtctccggcgttctttcaggcgcctgcggtacgaccggccatgcaagcgaagccaccgggtcaggtcgcacaggcagcgagttcatcgtcgtcgttcccaatgctcgcgacggctcaggcgcctaggcccgggcgacctgccactgccctgcaagggaagccgccggggcaggtcacacaggcagcgagttcgtcgtcgtcgttcccaatgctcgcgacggttcaggcgcctacgcccgggcgacccgccactgccctgcatgggaagccgccgggtcaggtcgtaccggcagcgatcccatcatcgttcccagcgccggcgccggttcagggctctacgcccgggcgaccggccatgcaagcgaagccgccgggtcatgtcgcaccggcagcgagttcatcggagcgacctctgcaaatgcaagggaaggtgccggatcaaatggcgctttcggcgcctgcaggtacactgcctccagcttcgagcaaggcgatggtgttcccccctcggccggggtacggaaccgtcgggcggaggtgccaggtgcgcgccaaccatgtagaagtcaagctcggggacaaggatatctaccactacgatgtacgtacgcacggcccctatctgtgtcttggtgtgttattcttggcttcagcgccttgcaaatagtaatccaacaaaaccctacatgtttcaagaaaggaaccacaaatatcatcataatttgcatccctaacaagttcaagcggtatatgtttttgtttcgcaggtgacaatcaaaccggaatcgacctcaagggcaagaaatagatggatcatcaaggagctcgttaacttgtacaagcaacacttggacgggcggcggcctgtttatgatggaagaaaaagcttgttcacggcaggtccactgccattccaatccaaagagttcgttctcatgctaacaaaccatgagagaggaaaacaagggtgtgtttgaatcccttaccatccaatcaagctctatgcaatccccattatgtttatatatgtgtgtttatttgacaacttgcagcgagaaagagtataaggtggcaatcaaggatgctgcaagaattgatatgtacagccttaaaatgttcttggctggcaggaatcgggatctgccacaaaacactatccaggctctggatatcgctttgagagaattcccaacttctgagtaatacatccacacactcatgcaaaagctagggcgtgaagtgtgatgcatcatatattcatatttatcagccacttatgaactttatatgaatgttttaaattgtttacttcaactccggtggcaggtatacaccgatctcaaaatcgtttttctcacgaaaggaatttggagatggtcagtctctaggaaatggtgtggaatgctggaggggttactaccagagcctacgccctacacagatgggcttgtcacttaatataggtagagttgtgtcttgtgcagttgtgcctaatgcttcctgcctttattgttttcttttgatgtatatgtattgtaacttttgcattgacctatagctacaaacttgccttgaatcgctttcaaaatgcctgcttctgaattacaaagaatcttttcgtatatttaaagtcccttctatacctttatcaatagatatgctagtttttgttatcatgctaaatgttagtctttgtactgtatgaatacactacaaaatatttgaactccaaagtgtagctagtgcctggttgaacatttttctaacaaactggcacagacagtgcccgtttctaataaagaaggcagcaggccgggttaacaacaacacacatcacgccccatgtcaacaaaactctacaacaccactgtccactacagcaatcaccacacaagccatgtgaagtattttaaccaaccatgcaaagcattttattcacttcaaaatctaatttctgaataaatcaagtaatcaacaatgtgatcagattagcttgtgttattaaagcagtaataatttatagcatatttttcctttttcctgcttactgtaacaatagggttttatgtattttgagttataacacatctctaatctgatgagctccatgcatgttgttaattgtgttattatttattaaagatatgttcgttgttgaaaaccttacttctgattttgatgaaatttatatttcctcacagatgtttcggcaacgtcattttacaaggctcaacctgttattgacttcgtagtggaatatctgaaccttcgtgatacttcaaaacgtatttctgatcaggatcgcataaaagtatggactatatagcatttatcttaccatactcattttattatctgtatgattatttcaccacgcatcatgatgagttcttttttttgcaaaacagctgaagaaagcacttaagatggtctgggttgcaaccaaccatatgcaagataaatgcattcactacaggattacggggctaacctcaactccattaaaggatttgacgtatctattctactatatatcttgttgcattccatttatgcaatcacattatatctttcttattgtgcatacaggtttgatcaagaaggcacaagggtgtcagttgtgcattactttaaacaacgatataactactacttacaatacactcactggccatgccttcaagctggccgtgttgacaagcagatctatttacctatagaggttgcacttttatgtttttttatttgccaattcgataactctaacctttttttggacaactatttgcatgaataaatatatcaacctcctagatatatcaatttattcacatgttattatatcatttatacttatgcaggtttgcagcatagttcagggacaacgctactccagtaagctgaatgagaatcaagtcaggaacatcctgcagtttacctgcgagcgaccagcagataggcaaactagaacttttgaggtggatagtcactaagcctatccgtgatgtcactttgtagtttgtacctttttgtgtatatgttttttattttttcaagttttctttaagtgaatactttgtgtgcattctcaggtattcaagaattacaaatctgatggatcaacttatgcagaagaatttggccttacgttgatggatcaacttaccttggttgatgctcgagtgctcccagctccaagggtaaatgtgtttcttatttttgagtatgaaagaacataagtgttttagttaccatctaacaatcaaacaatatttttagcttaaataccatgattctggaagagagaaggtttgcaacccttccatcggacagtggaacatgattaacaaggtatcatgtcttgttcttctaatcttgtctaccatacttggtttagttgactatttggttggtaatacttgtatattttctagttgcgtcaacaaatgaaacaattatgtaacgactgcaaagaatctattagatctgtagtctctctctatatacacacatgctattcgtcacttacgtgaagcttcaccaaggtataattactgaaagtcgatcaatcattaccataaaatgactgagcgatcttcagtaattatatcttggtgaagtttcacctaggtgacgaatagcgctgccctatatatatatattattttggaatatttggtgaaattttcagagaatggttgatggaggatctatcaaatattgggcatgtataactttcgcctctcgtttgaatctgaatgacgttgtgatgttttgcgaggctcttgttggcatgtgcaataacattggcatggtaagtctatctcgatggcacttctcacaccatcaaatttggtggttaaaagtaaatttacatgtttttgtagcaaatgtgtaccagaccgtgtgtagaaatcaggaaagcacaccaagacaaattagaagccgaaatcaggggtatccattcgcgttctgcgcaagtgcttgctcaacaaggtctaacagcgaaacaactagagttactcatcataattctgcctgatatgagtggtttttatggtaagttgtttaaatcgatcttcaagctgaagattcttcgatattttaattaaccttttccatattaaaatataatttcttgaattttacctaatctgtaggaagaataaaacgagtttgtgaaactgagcttggtttaatcactcagtgctgcgcacctaagaatgtaaggaaag

SEQ ID NO: 358 - DNA, 2421 bp, Zea mays
  source 1..2421: mol_type = unassigned DNA
gcgaagctttttaagtgctatgttactgtctacttcaatatcaggttgaaagaattatgatatcatttcattttccaattaggttggtggccggaacacaatgcttgaagatgctttcaaccggagaataccgcttctgacagattgtccgacaatagtctttggagctgatgttacgcacccatctgctggggaaagttcatctccatctattgcagcagtatggattctctctgggtttcactattttctttgtcttactcttggcttttagttttcatttggacagacacactactaattgaatgtatttgtttttggtagttgtagaatcttgttaatttatttggtttcaatgttatacctccttttgaagtattctttttggacagatctttagtaacatgagtttttaaaatgaaaatgcatgtcatttccaatcttgtgctactaattctttaaaacttctgctgcagatgatgcatgctgtgtttgtgatttaaatgtattctaattcatatccatttaggtggttgcatcaatggattggccacaagttacaaagtacaaatgcttggtgtcttcacaaggtcaaagggttgaaattataaatgacctttatacagaagtggaagatccacagaagggcattgttaaaggtggaatgattaggttagttaagacagattagtattttgtttttttgttgttgtaggaatgctgacatttatgtattgcagagatttgcttatgtcattcttcaagtcaactggccaaaagccttcgaggattatattctatcggtttgtagagatggtttcatacttttacttgtcttttgtttgatacttatatggcagatcttccatttttgcagtgatggtgttagtgaggggcagttcagccaagtcttgctttatgaaatagatgccattcggaaggtcattcctgctgaacctgctttagtcatttccatctcctgcatttgatggctactctacttgacatgcatgttgtttgtgatcgttctgccaggcatgtgcaagtttacaggataattatctcccaagggtcacatttgttgttgtgcaaaagcggcatcatacccgcctgtttcctgaaaatcatcgttcacgagatcaaacagacaggagtggaaacatcctgcctggtatgcaagtcgcatagctgctaggcagcagtaaatattgatatgcgttattatttaaaagtatcaagtcttgtgaacctactttgaagtttcaagtaaaccttgtcatcaggaactgttgttgatacgaagatctgccaccccagcgagtttgatttttacctctgtagccattctggtattaaggtatatatactgcattatgaatcatgcttatcagcctagtccttactgcggattgtcgagtagtaatttgcacaatattaaaatattattcgatttttttggtcttgcacaggggacaagccgcccagctcattatcatgttcttctggacgaaaatggtttcagtgctgatgcactgcagaccttgacttataatctttgctacacgtaagcttcattgatgatgtttcctcaatttgcataaaatatgtaccattttgccatggttgaccttttttttgtcatatttattgatgtcttacttgctcgcaggtatgcccggtgcactcgttcagtctctataggtgagcactaatgcagttattacaaattacagtaactgtttgttcatcagtcaaattttctcttgaattttatgtcttttttcggctttgcttaaaaattgtttccgcttttcgtattgaataacagttcctccggcatactacgcacacttgggtgcgttccgtgcccgttattacattgaggacgacagttctgatcagggctcattgactgtggcaactcagacggatgatcaatctgtcatagtgaagcaactccccaagatcaaggagtatgttcagcagttcatgttctattgctaaagctggagtgtattccaaatagttcctgaaaagcgtgcatgcgacatttttcttggattgatctatgatgtcgtaactgtgaactcactcactcttttgtctgtttcgttccatcatcatgcttaactgattcgaaacggaatccttttgcttttctgaaatgcatggttctggttgctgcattaagatgtctagagcctttgggtctactttgtctgagcggcaggtcgcctccacgctgccttgagcctcgttaaggcccagccgggtaaaatcgtatgcgtggtgcttgttggcagagtagaacctcacagtctggtttatatcctcactgtcggaaacttaaccgatggcaggttagcagtgaactggaaccgtactgttgtggttgcttgaatccgtcagtgttgttaatgc

SEQ ID NO: 359 - DNA, 721 bp, Zea mays
  source 1..721: mol_type = unassigned DNA
actcgtacatgttgcgtccgcgtagtcggtaacattgattttatttgagtaagatctatcttacatatactgtcgcaaggcatggacacttagccagtgttctttttaacgacatgtctttgttttcgtccgtaatgtcattttatttggaagcgtggggacacgtgacactatttgaataccttgtttaacaaggaggttagaaccgccccgggtacacaactcacttcctcagaggtcggagctggacatgtgagaacctgatgacttgacgaggttccagatcggggtcaagtccacgcccgggtacggactgcgggtcgggactgcgtgagtgaagtttcatggcaggcagcaagagctaggcccagcccagcccagggcccaggcaccttcatcatcagccagagtgcttgacggtacgtgcgacggtgcgaggtcaagtctttgtgaaggtcatataaaaaacctctgcgtctcaacacgcggtccgcatcgcctgcaggctgccacataagtaagctaaagttcacctttcgcgagtgagagcaccggcgatggccaagcccgacaatagcggggactcgtggtcgtgggagtacaggctccgcaagtacctcctgttgctggccatgctggtggccacggtgacgtacggcgcggcattcaacccgccgggcggcgtctggcaggacgccgacccggcactgggccacatcgc

SEQ ID NO: 360 - DNA, 650 bp, Zea mays
  source 1..650: mol_type = unassigned DNA
cgagaggcactacaccagcctggcgccgctccgcatcctccgcgtcgtcatggtgctggacctgttcagcctcatgggggcctacgccgccggggcgttccgggacaggctcacggccgtctactccctggtcctgctggccggcgtcgtcctctacctcgcggcccagatggcgctggcctggcgggcggacaggaaggacgacagcgcgcccgagcggctccgcaaggtgctcatggtgctcgccacgttcgccgtgagcgtcacgtacgtggccgggctcagcgcgccgggcggcttccgggaccgcgccgagggcgcccaccgcccgggcgacgccgtcctcaggggcggcccccacgacgcgcgcctcaaggcgttcttcgtcttcaacaccaccgccttcgtcgcgtcgctgctcatcatcatcattctcctcgagaagaagctgtcgtacagccagaatgtgcggtcggtcgagctctacgggttcatcgccgtcacgctcatcggcctcgtcggggcatactccgccggcagctgccggcaggttgatactactatatatgttaactctctcattgctgccgtcattgcctgcattctccttcaagcggctgccatgaagttctgcaaaaaggccataatgg

SEQ ID NO: 361 - DNA, 735 bp, Zea mays
  source 1..735: mol_type = unassigned DNA
tccatcctagaaggacccacccctcaaataaccccaaggcatcgagcccaagggtcagatgaggcagagctagaaggggggcggtcgggcaaactgagaggaagacactcgagtggttacacacctagcctagggactacccctatcataaatgactgaccaaattaaatactcaaggcatcgagtcacgacagagggtcgtccctccttccagttatgacctacgaacctagaccaagagccccactcatgacctatgaagccgaagacctatgactcactcttggctttaccgagcctagtcctaagtctctcgatgatctacaaaacccacaacatggcgaaggacatcgaagcataggctacgaaggacaggggacgatgtggcataggaagagtaatgacgatgcctgggtccaccaccgtccatgcatgtcatcctagccgacttaaagagctcaaccagagagctcaggggatgatggtgaataccgacaagctcaaaggacaagggtgaatactgatcgataggtttctaccaatggtagaacacttcattctaccatgacgcagtaacttgttccataagaagccacttgtaaccgacccctccttagtctataaaaggggagggtcagcccaacgaaagggaggataggtgatagagcatcaatactcagtcgacttagctaggtagcgaacacctgatacgtagtcccttagaaccaacaacac

SEQ ID NO: 362 - DNA, 510 bp, Zea mays
  source 1..510: mol_type = unassigned DNA
ggagcctcgactttgtcgttaacagtgagggagttatgaccagggccttggtagcccagtccccctcagcaaaagatctggctgacatcactaaggccttcgatgatctggctgacatcactaaggccttcgatggagttaacagtgagggagttatcaccagggcctcggtagcccagtcccctcagcaaatggtggtgcttgttgggatgcgcctatgttgattttgtggggatgatcgaccccgttaaggactcattccatgacctcctcttattgaactcagaatacagactcagctccccatccaacggggcgagtcatgacccggctcaggagtgcttcatggttagcactctaggggctcgctccccacccatggcatgtctcgagaaaaccctcgcctacataacgatgcatgcagcgacatctgcaccgccacgactcgattgaacatacaaaaggttgccctaagagccgagtccttcccgagacaactaatatttctgg

SEQ ID NO: 363 - DNA, 1879 bp, Zea mays
  source 1..1879: mol_type = unassigned DNA
ctgagcaaaacaagatgcctaatttgcagaaggaagaatctagtggtggaaagggtgcagcatctgccgcaggtggtgttcaggagagagtgaaagaccctaaggtgagagagccagtgtcagcgaaagaccctaaagtgatcttagaggttatacatatggtgttcaattagttatgtgtccatatatatatgtatatcttgcagacactgaggaggcttgcacagaatagagaggcagctaggaagagcaggcttaggaagaaggtgagccagtcaccatatgggactgtatattacatgcacaagcacagcatatataacagcatatatagagaaacgatacactgcacaattatgtacagtttttcaaagaaacaaacagtacatttatatggcatatatatatcctccccgccatataaatatatatatcccttattagctatattaatatattctttttatttattcagtacaccatttttaaacctactgctgttttcctaatcgattgaagtctcaagtagtgtcagcaggttggttaaatgaactttaatttgtgatgtaacagtcttttggttctgtccttttggccttacatacatgtgctttaggatacgcgtgtactttttcttcctttctcttgaatttgacaatgcacctaaagaataataatatcacttccaaaaggaactcatgcatgtatttttctgaccctcatgatttcatttctatatgtatagaccttaaagtttgagtgacatacgtaattatttgatatattcgttcgatcattaattgtttcatttctgaatctgggagatattatacaaaaaacagctttttacagctaatggcggagctaaatgaggctatatatagcgggctaccaaaactatgtagtctgagttagtagttcaaaagcttttctgtccttctaaaataatatcttcctttttggcactgaataagtatgctgaaaatgcctttagtctatacatatgtagccaacctttgaatgaatgttttgatcgagctgagtacacccacaaaacgtaccatatggattgatgcatccactcttgtcttactcttcaggcttatatccagcagttagagacaagtaggatcaggctcagccagcttgaacaacaagttcaagtggcaagagtacaggtaccaataattcttctaccagcagtatatatatcttggaagaggcagttatatatatggtttttgctacacacagtagactagtacttataattaaaatgtgactgctactatatataattaatgttcttcagggtgtcttcttgggcactggtgagcagccaggttttccttctgccccttcaccaggtagtagtaataataacgggacactccatttcatctctttgttttttccctaattaacatggatggctaattaacatggatcataataacgatgatcagctgcagtatttgacgtggagtatgggaggtgggttgaagagcacagcaagctgatgttccagctgagggccgcgttgagcgagcacctggcggacgaacagctgcagagcttggtgagcggtggcatggcgcagcacgaggagctgctgagcctgaaaggcgccatggccagggccgacgtcttccacatcttgtctgggctgtgggtatcccctgctgagcgttgcttcctttggttgggaggctttcgcccctcggaggttataaaggtatatacgaatagtttactaattaaatatataacaatacatctagctagctacctgtatattattaactaattggcatggtatagatatatagaaattattataatatgcatataaaggtatactattaattaattaccagta

SEQ ID NO: 364 - DNA, 566 bp, Zea mays
  source 1..566: mol_type = unassigned DNA
tctatatctagctagttggcgcctgcaaatgagaacgcccagaataatagagatcgtgcatgattgcatgtttgtttgattggttctcatgcatgtccgatccatttaatttgcacatccatatagtatcttcttgtacgctagtcattgtttatggaataagcagctaacccagtagtgtgcacaaccacacatacagagtattgtttagcactaaatcatccaatagagaccaactaatataataatgcgctagaatattagctatgtcttctctatacaaacctggtgataatattgaacactgtaccaattatacacacacacgtaggccgagaggccaagcacataccttgcatatatatgcatggtggtgggaaaagttaaaagttgaggagcaaagacaagacgggtttttggactcatgtattgctaagatgagcaatatcgatcatatcgggggagtaggttaccggatagggacaagagtgcaagatatgttactcactttgttttaaagtacatgatatttttatttacttttgaatctcgtttgactatttgtc

SEQ ID NO: 365 - DNA, 1743 bp, Zea mays
  source 1..1743: mol_type = unassigned DNA
acttctcgattaagttacatagttagccttgcctctggcgaccaggtttcgctgcaacgcctatgtgacaacttaaaaaaccatggcactttttatcttagttacagcttataccacactgaatgcattgctatttcactggcatgattgcatatgctgaatggatgcttattaaagcatgtataccaaggaaaacttgctgaataaagctggcagattttccatttgttgtaatctcctcgtgtgacttcattgtgaagggtgattttatgagttgaatattttcatgttaattgacgacaagtggacatcaatgattgaaacccgataatcccaaatagggaatattagctgcagatatattggttcttaacagcagctttgtgtatgctaagaaaatatgtgagatatttttagtgcttcaggccaaaggcttggcctggcttttttgtacaaacagatctgctgggcataccagcttgacagaaacatggtctttctttagtaagttttttgaaccatacatcattgagaagattctcagtaagtctaaaccacaactctagtaaccaccaagcaagaaaaaggagcattgacaagcacaaagacgacaaagtttacaccatattgttaaggataacaccagcccacggtcataaagaatctaagtataaaagtgcactgctggtaagaagccagttgaacaacaattttagagttccagtgcattccttgtcaatttgcgcactgaagtgccattaagatggcactagtacagcaataacatagttgtgtggtaacccatctagatgtgatatggactgcaagctgagtgccaaactgtatcacataggaatactatgaatgactacagaatacactgaagacattgcagtctgatatttagatgaagcattcactagatttctgtcagaaaaacaataccaagaaaaggctaaagacatcattgtcaggtttgcatcatattgtgtttgtgaaaaagaatattagtcaaaatgcaaaatataattcgttacaaccatatatagtactccaacattagccttccttttgccagcatacaagttcctttatttattttgtgtttctttgcatttatggtagtttctttcaaaacatatttatgtgtttgtttgcatatatgtagactcaggtataggtacaaccaatcttttgaataaagcataccaagataaacactaggtaactctttgttttatcaatgaaaggagctatgttatagtacatacatggtgatgctaaaacttagtatattaagttcacatctcttatttatttgcagatattagtgttttcaaatcactcgattaatcatgtttaaccaaaggtaaatcaataaattggtcctgaagaaggattaggtgcatctattagattatattgcctagtaaatcaatcagttagcaaatgattaactatagtcacgactcacgactagtcggcctttctagttgaatgactagttggtagaaatggcaacttgggctaaagcccagtagcattcaaagtccagcacataccatcatcacctatatatactactgtcactcatgctcctccaattgtgacctagccgccacctgaaccccagccgccacttgaaacggccacaagctagagaggaccatgtctgtgtcatactgtcgtgtgtgtgcgctgctggcttgctctcaagagcgcgtccctctggcaagcatcgag

SEQ ID NO: 366 - DNA, 2097 bp, Zea mays
  source 1..2097: mol_type = unassigned DNA
gtaagttgaacaagcaagtaatcacaatttctgttgcctcacttatgttgtattttctttggataagattggttctgagcggttcgacaaggaatatgcctatagcatcagacataattatggaaaagaaggaaaacggacagtaagtccctcctccatgtgtaacttgaaattgcaacggaattattacttactctcacacatgctactccaggattacactccatattcatgccaaaatatcatatctgcaacacctggtgttggagatcaccatggatgcccgtttcgacattttgggtacaatttcacccttagttttctatagatgggtactatgcgcttattatttagataggtgctctgaactttctgttagcaatatcagtttgcatttctgatccttttttcactagattactcctgaactttgagggggaagtaagatcacatttggaaactagaaaatctgaatggagcaagaggcctccaacttctagttttttctgattaaaaatgacacccaacaaaaaaagcttaatgtaccaaaaagaagtcatgcagttatgaatgagaagttaatgttttgtttactcatttggtacccaagttgaaccaaatagtacaatactaaactaccaagcagagaaatgagacattttgtcctatcctgccaatatggtttcatctagtctcatccatacttttctattgtatagttttaatttctttctcgattatggtcaacagcttctgttgtgatgtcacttggcatgtcagtttgtgatgtttcaagataaacatgattctaccttgctttgtacctgctgtttgctccaagcatttgcttctgctttactgtatctgcagcgaagaaaatttgcgggcagcactcaacaaaatgggcgttggtgggcatgcattggaagagataatagataaagtgaagaacaggcattaccaggtgctgtgcttcattgccatgggcttaaccgagcaatatgatacccttgaactgactggtttatctgtcataatgaattaattatacagctagcttgcacattaacatttgagaccacacacggtgtctcctgtgattctggaatcaaccatccaaaccaatatttcagtgaaagccagaaagttctgcgggccaaagtgagtgcagtggtttattatacacttgacatttgttcttacgttctgctggttctgtcaacatgagtcactgttccaatttaacatgtgtggctcaatgcacagaaccagaaaatggagagccaatcagcaacctaaattgtattgcagctggagaaactatgcatcttcaaaaatcttaccaggtcttgactccacccagcttttgctctacattttctctatgttaaccacaacttgttcatgatttgatgcttttctaatgtgcaatgatggacacaagacatgctgcgctccattttctgtttatggcatatgtggtttatacctctgctgaattttcttttgactgccatcttaattcctgctgaatttatacctctgctgagttacactggttaggccgttcaagtcctggggccaaagaaacccggtcaccatgttcaaagcctggcattcttcttaatgccagcatctttcccccttatctggtttcttttaattcccttctcacttccagcagtttcattagatattttctttcccttgttttattggaaccatgtcacatccattcgacaaaattcattttttgaatgatttaaaatgccccagaatagtgtattatttattttatgtatgatatttttgttttgccccatccaaggttgccctttattactggatttgcttatattattcatacagctctgaagtttaaggaggcttttgttaaatgtgtgcgaccttgtgaccgtcagtttttaactgatttgctggttaaaagtgtcatttctgtacatccattttttttatcaaacatgtgatttggtgcagcacgtgagattcatcaccacaattttcattcataaactcccaaattttatacacaagatactataagcccactaataatcttttggtcatgcagcaggt

SEQ ID NO: 367 - DNA, 830 bp, Zea mays
  source 1..830: mol_type = unassigned DNA
tccttgaagccaattatgttatcattactgattgttgaccattggcgtctacctggaatattgttgcttcctgctgttaccaaattccagctgctggcttggcctaaaaagaccaggctccagctgttagctgccatgccctacccaagtgatggcaccacactgtacactagaagtagaagtgttatctagtgctgcgaacagcagcaggtcaaatgcgtgtgtacatgtaattctccgaagaaccaagagtgaacattctgaatttgatgggatcagctgtgctgttatgttattgccaagatctttgggtagaatagagttctttacttctgattatgcccatgtattctttttaagtgactataaaagctttgctgtaattctattagaagaaaaaaagataggttggtctagttagggctagtttggaaaattaaaccctaaggaaaaaattaaactaattttcctctcaatccttgtaatcctgggggatttaagtttctagaaatttggacctaaaaatttgacaattcaacaaacaactaaacacaacataacacgttaccaatcaactagacaagacaactaaatgcatgcaagtggtgagcaaaatcaaaattgcacttgtggcaaagttttgcacgaaaatgagtgacatctgggaacaactgctgagaaagtgtggcgcaccatagctatgacattgaatcaaaaagttatgacagcgaatcgatggcggcacaatggatccgatggagagaagggtagcgaacggagggtagggagggggatgataggaactttcagggcttgtttgggagtaaagg

SEQ ID NO: 368 - DNA, 2484 bp, Zea mays
  source 1..2484: mol_type = unassigned DNA
aggtcgagtttatagactagtgttattttggcaacatgtggtttcactagtgatgataaaagatatattagcacccgaagtttagaagtcagacaggatgcagcctgaacatcatcctcttgtgattggtggggtaatttgacacaaatgtaaaatgcatctttcagcatataaaaaatatttcagagcaagtgcaaactagaagggcagaaaaaaaagtctggtacacatagcagtttccaaggcaaagggatgatgactacctattgaaaaaaatcattttatttgcagagtttgatgtcacaaattccattttttccagagtatggtgcttcaaacaatgaagtttatattagtatacttaagtcgcagttctgttagtttcattcccaaatagacatcattgttttggattctggaacagtatgctgaaagtgaaaccttgagttgcttgcaaccatatttcctatttataggcaaagcgttgtacggtacactggctgtactaaagtggggcaatcagtgccttgaaaattgaggacatcagataaggggcaccatttgactgtagtgatgcactccatatttgcaatgtccacgcaaaatgcttttaggtaatggtcacaaatgtacgcaaagattggctatgccctcttcactatcaaatggcatcaatcgcagtaaaatactttgaggtagcctacatctgggaaccagacaacaaaagatgcctatctatgaatgcaattgttaaacaaataccatggatcttgaaatcagcataagcatgtatagtaattattaagtagcggcaggaccactttaactttcgtgtagtttattcaattggaccccatccctatgcccttgtcactatattttcagcataaagtggaaccatgtctaatagctaaatgatgtgggcataatatccaaactcttttcaccaatggttaaatactttgaaacaacctagtccaataatttattcattagaagcacaaccacaatcacaagaaaattaaaacaaagacacggaaggccggaaccttgagttgagagtaattaaagggaaatcgtactcccaagtaagtttgattaaggataagaagggtttgctcaccgattccctgatggccttggtgagctgcctcctcgccctcttgatcttcttgtccaacgcctgggcctcgttgtcatcaatgcggggtagcaccctctccagcaccgccgggtcaagaagggccatcgactcatcgacgaggtgaggatacaattcgcgcatctcatctaaagtcttggccttgtgccccagcgcgtcattgatggattaatgcccggcgttcttcacttgggcggcgcccttgctagattgctcgccgccgccggcgcagcagggcgcggcgagggtctctgggacgcgagcctcgtcgtcggggcggcacgcgcgcccgaatagcacgagcttcttcttggatgacggctctgtggcatccgaggccttggctggcgttgactcgggcggcggcgtcttcctctttttgcgctcgggtggcgcctcgtggcccttggtggacagcgccgtccggctcgtgaacgccctcttcgccgcggacgacggcttcgtgctggtgctatgctctggcgatagggcctgcggcggcggcggcggcctcatggcggtaacggcgtgttgtgattttgcacttgcagcgtgggagagggagcgaggagtggagattttcaggaggtcacctttttgctgctttaccctcatcaaatgagagcttcgacagattaccctcgtgcaaaactgataatggagttggacaaactgatcattttgagtctttgctatacagacagctcgcaatgttgcttgggcagcccactggtgatgcatctccaggaaagagtactccaacaaataataaaaggactaccaagaaattgacacagagtaagaaggaaaaaattagcacctaactgtttgtccacctatgtatcaacttgatgtcttgatttatgaacaagatgtcagctatgtatgaacttcctcacagtagtgtttaccaaattagcacctaattgtgtgaatctggaattgtctttgatccaaattggtgaggtttgctgtaaagttgtctgcatgttttagaattacaggtgcttcactagaaattacaagtgatgcgttttggtaaacactactcaaaagtgctgtaaagttgctgctgtggggaagagccagccagccaggcacggcgtccgggtagcagacgtcggcaaggatgtagacgtccgggcagcagacgtccacggtggattaactgagaaacgaaaaagaaagcattcagtaaatgaaacatcccctcgcggtgactgttgacctctgactgccagagggcgctgccggccggccaatacacatatatgcccattaatatttatgttcttaactaagtttatactatattatataat

SEQ ID NO: 369 - DNA, 1768 bp, Zea mays
  source 1..1768: mol_type = unassigned DNA
ctacgcgtgtgtgcatctacattttttatttttttgcatagcaagtctagtttcatttctctccctctatatgtcactacagtttaatttttagccatagtttaggagttgatccaacgatcatccaaaacatgtggaacttacatgatgaggtatctacaagatatagttaattaaccgaaaagtctatgattacaaattgaaggtgtcttggttacatttcttttgatatgcttggttcccttgaaaattctatcgtcgcaaacgtaggtatttttagttttgcttaaaaaaaggtgttttagttgataagattccttttttgatgtttgggaacggtcgaacggatcacgtgcaaactaagcacttggtgtaaaaccatgcaaaccaacatgtagttggaggtggagggggtatttagaaatataacaggggaggtggaagggttgttttgacagctgatgcacggtgggagggttattttgtaatttttccatgactccttgcacgatttgcacgaagtgcttggtttgcacctgatatattgccttgatgtttatctattttccactagtctagggcaaacatctcattatattgtttcacttctaactttcttatgttccatgataatcgaactaattttatgttctagatatgaaagtagtttttataaacttagtcaaacttttagtattttacttaaaaagaaagtaagttactaataaataagtaatagaaagtttttaacttctacatgcaaacccttgttggatcgtaataccccatttgaatcacaattatcgtctagtttcttctttctaataatgaagggttctacaaaacttgtttcaccgtggtcttagctaggtttcctttgtacaaagcaaagcaaatgagaatatggtataagagtttaggtctcatgttaactttcctaacaagcatgtggctagacttgtggaaaatttccattgcgtcatctatgcctccacttaattcatgtgttgtgcacataaaaaagcgacaactataatcctatgtatttttttcataagaatcatgtattacaatggaaccaacttttaagttgacataggaactagggttagaactccttcaacaaggacaacaatgcctatattgaagcaatagcaaatcaatcatatgtcctagagtcatgaatgataacaacttatggtcaggttttgtgaacttatggtcttttggtatctattttgtttgaccttttataaatggaaggaatatatgaaggaaagtatcattcatgaggtgtagcaatatgatatgttgctatatgtttttagctatctcaacaaatttcaacatcttaagaaagtttgtagaagttaaacaaatatacttcaccatatgaaaaagtaaataaaaaattgtagcttgcttaatcaacatttgtcatgtacttgtgcacatgtttgctcacacaaaaaagaaacccacacatactcacacaaacctttaatagttcgttgacatatgttaatagttatgtacatttttcaggtacataaaccttaataattatgtagtcttgaatagttccactagacaaattaaacattaatatacagtttttagctaccctgagtccacatgttaataattatgtagctagatcttttgatgatcacgatatatcagctagaatttattttggtaattgctctaggcatgaaaatcatattcaaaaggctgatgaaaaataatatttgtgctcatagtttta

SEQ ID NO: 370 - DNA, 502 bp, Zea mays
  source 1..502: mol_type = unassigned DNA
tctctattatgcctcttattggttggatgtatatgagttgcgctctcttacatttgttggtgcatggtccactatcaactacagctctaatacaaagaagatgtgtgatgcagcaaagttggagtctttgctttattttgatgtcaacatgtttacacttctcttagatttctccacaagtccatcagatcctcgtattaccatggaggattccacaactgaaatgtatgaggcagtgcggctgtttgaggctactgtaatgttgacattctgttcaggaggtaaagcacttggaataatgggcatacagtatttggatgcatatagagaaaagcaggttgccaagttgaacactgataacttggttgccaatgtcaaaaaaccatatctcctacttgagctcggaatggttcatacagaccaggtgatcgataacctacacaacaagggtcaggaagcaaaaattttagaagccttagtagcatacatatacaggtccaat

SEQ ID NO: 371 - DNA, 888 bp, Zea mays
  source 1..888: mol_type = unassigned DNA
tcgacttggtctagcaagtcgtccgacttgtccccagttcggcccaagcaacagactaaagtaaccattgtacaaaatttcatatcgacttatcggcatatcattgtacaaaatgctaaaaggaaccatatcggcccaaccattgtagctactagtttcattgtacaaaatgctaaaaggaaccatattggcatatcatatatccagatttaagtaatagaactaatataatacttaactttttagaatcatataaactgattacccagggcatactgcctatatgaattcagtattgtaccttctcaagcaatgtagagttcagagtgtttccaactatccacagaacacgtgaaagaatttcatcaggtaaaagagcttcagcccaagaaacagacacactggtacgtaaaacagcagccaaaaacctgtcatagaaaaatactacattgactatggctacagcaactttcagtgaaaatacttgttccatctcacattcacttggcatactacaaaagtacagcaatacaatatcaagcgacaatgaaaagcacaagcacaaggataaaaagggcacaaaagaccaataacattttgcataaattatgaattcactgttttttcctattcttctctttccagattgacatgatcaattagatatatggttgtccagtatagaacataaaacataatccaaattttcttacactaacaaagtaaatatagctacatgtttaccaaaaggacagtcggctcaaacaattttgtatcttcaattcagcaaatgacagttgaatgtaactgtatgtcgccacagagcaaatgccacaaacatgactagttttgagtgaggccatttgcatactgctatgatacaaccaa

SEQ ID NO: 372 - DNA, 2736 bp, Zea mays
  source 1..2736: mol_type = unassigned DNA
cattgcacaaactgattgtaaaggaaacatgaaacaatgtgaatagtacttatgagtctgaaattctgataacaatggctgcattgagattctagatctctttcacatgatttttccaagaccacagaccttagagcgctaaaataatggtggtgcatcaaataatctagtgatatacagtgagtcaatataggaaaagggaaagaattaacagtgtacaagttttgttatagcaaattagatatcaagaagacaactcatggtaatcataactagataaaatctacatcatagtattgaaaacacaacctgaatacttcagaaaggcaagcagagtcgtctagaaatagctgatccataaccgtagcagtcaaaccattgtgcaggctgataacatttactagagattcatgacaggctaggtttcccaggattccaagacagatttcctgtagggataagatatccgatgtacagctgagataatggttgtcgaaaatgtggagcagtgaggggcaagaattagaaaaaggcaagtgttacttcacctttactctagaggattgagtcacatggagatttgccaaaagcacttcaagcacaagattgttcatctacaagaattaaggatatgcattgtcagcactcagcaacactggatccacttacactacaagcctacatgtgtcctcaataacaaaaataaaagtgaaagaaattttagaaatcattagaattgacttcaatatgccaaccgacatctaataaacttcttctgcagttttaaaaattgaatattattactataaaaatggctagatgtatgcatgagtagaatatttattaaaaccattcaactagattgatgtggaagaataatgtatggtggataactttcaacagtaccagctatctattggacaaggtgcaactcttgttattcaaatgttggtcaataccagcattttctgaaaatataagtattttcattttgtagagtttcaacttttcttttggacaaaatagttccaactttaaagcatattctcctggtatttataatttatatagctcgcaagagcatctgctaaatttgtagaacacatggacttagctcacacccaaggacttcatctacctccactaatgagtattaagaggtaatatgaactcacctcatcattcccttggggcaaagaaaaggagtctgaagtagctacgttacttaaaagggcatttgatttctcaagttttgtgcaacgatctaacaacaatacaacattatatattaaaatcccaaacagccatacgatacttatattgaaatcttagtgcaaggtctttgtttttttctacaccttttcttttgcaaagaaagcatatatgagctagaaagctgggtatagcactatagcatagcaatctacattgtaaaatagagtaagaagatactgataacacaccatcagttctgcttgtggtttactagctgcaaggtcccacagaatgcaaccacactcttcccatggatccttataatcaggttgcgctgattccccattaccagaatttgcatccttctcgtccggggcacattgcttcacactgtttagtatcatggagtcatctcgtttgctaacatacaatttcaacctctaaacacgtcgcttacctgaactctttctccacattggaaccctggggtagtagctgccgtataagggagatagtgtagctgggatcaactgttgtcgtgtcatcaagcagctacagaaaatcacaagcatgagatctagcatcagcagggcagcagacagccagccaaacacttccttccaagacgccaactgctcgaaggaatggcagtgaggcggagactccaaggcgacatcagaagtggtgggactgggatgtgagcagtagacataaggaagagggccacgcacctcggaagatggcgcgaacgggaggtgagtgggagcttcctcgtcgtcgtcggcctcctcgacgccgccatcctcttctctctgactcgcttcttcccgttcctgcggtgactcgggcgcttcgtcctgcgccgcttcgcccccctcgagggcatactctcgcggagcgcctggcgccattgcgacgtgaccggcggagattagcgagtacctgagtattggccggcggaggcgcggagcttgaactacaggacgctttcgagtttcgagggcgctgcagaaggggaaccctgaaggcctgaactgagggcaggtttcgtgcggatgcgcattggggattccggcattccgtgttcaggcagcccatcctactcagactcagagcgagttcctcttgatgggcttacgtgatccagtctagtaaaagaaagaaaaggaaatggcgaatttacggcccgagagcggtccagcccaaacacagttctggacacacgaacatcggaacattcgcaagattggtgacccagtgtcacccgaaaccctgcggcggcgaccggctgtccggtgaccggtggccatggactataccctcgcggcgctgaagatcttcggctcccagctcgccagttgcaccgaggcgccgtgctctgagggttgctctgccgcgcagatgctctccggcatccgcttccagcgcgcctgggtccaggtccccaaattaacctcgtctctctccttcctctcccaccttcattttgtttatcgtagcctgaggatttgcagcggcagt

SEQ ID NO: 373 - DNA, 522 bp, Zea mays
  source 1..522: mol_type = unassigned DNA
atccttctacgtacaatggatagagggaagcctctccccaaggagtagctatagtactcctagaatcatcatgatgctggagctcttgctcttgcgcctttcatcacaaacaggaatatttctcatgcttccacctgtaatccagtacctctgacaactcttgcaaaaatatttggtagcttaatgttgtagttgttgtactaacaaaactttgtatctatggattccaatttggaggtcctgagggttatgtgaagatagaggattttctctagctccttcaggaccttcgctccactcgggacataacccgacctacaaattagactctgatatggatatttcatcattgctggttgtttgattttcacactcatcactgaaattgttaaggctagaactatttgcctgaccaccatataattcccgatatgtgcattgcttttcccacagacactcatgtcccctctatcttcacatacaccatgacaaatataagaagactaagtaaaacaaatgtat

SEQ ID NO: 374 - DNA, 631 bp, Zea mays
  source 1..631: mol_type = unassigned DNA
taagaatcggaggaggtgtgtgtatttactgggtgctaattgctataaaaaaagtttaaaggccctgtcatcttacttgtcgaaaggcctttaaaattatagagacggtcctataggcgttaatcctaattttgctaatacgtcggaaagttactccacgacgaggttagcgatgggctaaagaatgcatgcagaagctgggcttgatgtaaaagactagtatatggtcgtttcctttcaatttcaacttccaagcgagcgccatccggacggatgtgagctggcctacctaccctaccgagaagccgacacttccctattcccaaaaaacgctgctttcggccactagaaaggttgcaaaatgggcgcaggcagaggtcgtcttggaagtgatgtactcttaacttttaccttgcaccgagcgatagttgtctttctaatcaatacgatcgccaactcgctattaaaacgctgctcttagagcaaacataataagggggttataagctaactaaatgctcaagtggaggagaaaaaataggagagagatatataagagaagcagactataaacttatggcttcgacataataacaaagacgttttgtatgagagacaagtgacgttctgt

SEQ ID NO: 375 - DNA, 2837 bp, Zea mays
  source 1..2837: mol_type = unassigned DNA
taaactaaataacaggctacaaagatccttttacggccaacaattaactctattattaaatttgctcttaaatgaagtctatattgcaaattactactcgggttaggtactagagagtggcatgcatgcatccgattgatgggtgacgataggcacgtaagtatttctcgtacgtacgccgctgcgtcagtacgtgtgtagaatgtagataggtatatagtagtgcgtgtatttctcctgcggagtgtgcatgaatatctggtttgcctacagtacagcaaatacagtcagaaagctctaccaagctggctagcaatgcaagatccatcggctgaacctgaccggcagccggctactttcaaatgggagcgcgtctgccgccgggcctccatgccggtcaccaagagtgaacagacaacgagcatgacatggttggagagccacgaacaacgcgcaagtacagatgttcaccctacccatatgcacccatcatatccatgcatgcatgcacggttctcaatcacaggagtcagtcagtacgtcaggagatcctcaaaacataatcaaatgcacaacatcgtctattatatatattggtcatggacttaacaacactgtaagcacgcatgccatcgagcaaccttgacggccccctagttgcatcaagtacaaaattggtagccaccggctaatataccctctcgggggtacccacgatcgaggagagcctgtgtctacctggtcttgcaacaggggctggttgctaccggcagcagctagctttgcgttcctttgcttcccccagccagcttcctccctctcaagtctcgtcaaaacactgcaggggagatgcatggccctagctggaaaaaggccatccatccctctcagggcaaccaaccaaccaaccactaaccagcaccgccaacctctctgtctctctctcactctcactctctacataggattacacttaagcaatgttgctaacaacactgctaactaagggtggtagtaataaacgacataattaacaggcaggacacacacacatatatatatatatagcggcaaggcgacgtgacggcggtggagtccgtccgacatctgtgcatgcaggtccgttacgcgagcggcgccctatggggcgcgcccttccgcctgttgccgagcgagaggacgatctgagggaagaaccctcctccgcccccgccgctcttcttcttcctcgtcgggacgtcgacgtcgcgccgcgcgtggttcctggccgagccgccgttgctggatcctccgctggcgctggcgctgcccccgtgctcgacggggtcttcgaggatggagctgggcgtggcctgcccgtactgcccggggtcgtcgtcgaagcggaggttctcgaagcgcgggaagccgcagcccaggtccggcggcccgcccggcacgtacaggaggatgttggacaggtccccgccctgcatcatcacatggtccacctgcatgcgtgcgtgcgtgcagcccacagctgggtttagcgtacagtaaccacggaaacggggccgtatctaatctaagcgtgcatgggcgtgcgtgtgcatgcaaacgtactactgcgagtgaagcgacgtacggctgattaataacttactaacgtacgtgccaggcgactgattatggcacgcacgcacgcacgcttgaataatccgtcaaccgatcacgctgctagcttagcagctgtcgcgtgcatgtgcatatgtagaagatttttggtggcacgcgtgtagtcttgtatgggtggtggtggtggtatacagtagtagtagcagcagcagaatagcactgtgtaccttgcaggagaggcagcagaagtggaagggctcctggaggatcctgtcacaggccaagcagacgttgccagagcccttgaagggcctggactgcggccgcggcttgaggaagatcaccttggcactgttgatcgtgtagggctgcatgcgtgcatgagaacgacgatgggtcaggatttttaataattcaaaacgattcggagcacgccgcggcgccgtccgtccgtccggtcaccaccgctgcatgctactatccccctttagctagccgccgccggcagcagaaacagtagctggtacgtgacggtccgcgcatcacctggacgaaggagcagtcgatgagcctctcgaggtcgtcaaggcgcaccacgtcattgtacacgtacctccgcacctggcccaacaagtcgagcacacagtcacacacagacaacactacgatcattagtaacatcgttatacaataaatactacggtacagcccgtcacagtacatatacgctgcgtaaaatgatgggtaaatcgaatttacccgttcttcctgcgtgcatgtgaacgtgctgtgctgtgcgctgcgcaacttataacgtgagcaacgcggtgcgtgcgcggtaataattccagcgggaagggaagtggggggtggggggcgggaaacaggcctgggcgtctgacgagcccgctaggctagtcaccggtaataattgcgacgctttgaccggcggctcgtcgccatcctttccgcgggagaccaagagggcgcctccgtgcactgtggccgcagcgaccgaaacgcccctgtccccggggaaaatccaggcgtcgcctcgagggcacaacggtcaggaagcaccgcaggccggattattttaaccccgcggtaaaaacaaataaacaggcaaggaacggacgggtggtgggctggtgcgagagtggcaatgagcgccggctcgatcgctgggttggtcactcgaagagagagagagaggagggggg

SEQ ID NO: 376 - DNA, 1913 bp, Zea mays
  source 1..1913: mol_type = unassigned DNA
tttgtgatgggctaactaccttatcgctgtagactttgtctgtcactaaaatcattctgtgtgtgaagttcaacctttgttaaggaggcatattggtctgtattgctgaacgacattagcgtccatgacttaagggataggagttattaccccaaagtcaagctgaatatatagcgatattttgtattttgcggatcaaattgaattcattttgtatttttctaattttgtctgaatatatagcgatattatttagtcatcacctaggtcatctttgcggatcaaattgttatactttgtgtcattatgaactcctaggcccagtttcgaatcacgagtctcttgctgcttcggccactttgtcttttttgcctaatgctggaatccttcccagctccattataacacatgctccaagtcttgcattatctttatgggactgtgtcatgtcacttgttgcttgttcttccatcattctacacttcacagctttattcatattgtgatgctacttgggctattgattcctctaatgattattgtgtttttaatgattattttattgcttggtagactaagtagacaacactttcttgttcaagtgcatagggtgatttgcatgctatgactattgtgatggctaaggtgatttgtgttgattgcttgtagatttatgtgtttctatataggtgctataagtatcgtacgtcctccatgagcgtagtaacaaagtgaggttggtgaatgactaatgtttgccatgtggccaaatcatacttaagaatttaacctctctaaatcaaccaagaagaagagtctgttccccacatttatgccttggccatcttccaataaagaagaatttcaaataatcgaccttacaacatgataaagatgattaacaggtgagacaagtccattttgggattgttgtgtttttctttgctagtggacgtacccgaccaagaacatttctcctcatacccaccaatagttttaatttcctcaaagggtcatctttagtatcagagaactggcaattagaatagcgtttgtggtgaattttatctattcttcctaatcgttcatcttccctatcaatgtcaactaaatcatacacaatcactaggtagcactcaataccacaagagaagagagcaactcacgctcatgacaaactctacccatgaattatttttctaagctctagtaaacgaaagcacatcaccacatgattttttttagaggaacatgtccacaatattaagaaactaatattacatgttatggaaaagtcttgaataatggaagaaaccgctttctatagtaaaggtgaaataaaagattaaagatgataagaggcatggtgaagtctaaagctacccatgattctataaagccaaatacaccagcataaaggatctaggtgacaacgagagtaaatatgattgtattgtgtggaataggtcaatacaaaccacatgtgtcataccttgttcgatacacattgaacaactaaaaataacatatattacattagcatgtatggacaaatttggggttagtaagaaaaaatacaatttctagcttctcagctgattatggtatacaacacgaccaacataaaattacactaggaaaaaaaggtaagattagaggagccatcacagagcatgtgaaccctactagtatgaacaatataaattttggtacttctttctagtagggaagcgagggaaaagattttgtgtcttctcttgttctcgaaacatatttctttataaagttacaaatcagctaaaaagatacaaacgtttagatgacaagttagcccatcataaggtcagaacattgttgatgatacgtaactttataaggaaaaatgttttgaggagagaagatagagaatcatg

SEQ ID NO: 377 - DNA, 2497 bp, Zea mays
  source 1..2497: mol_type = unassigned DNA
gacaacttgtccactgttcatgtcaattaaatattgcacaatcccaaggtagcagtcaatattataggacaagagagcaactcactctcaccacaaactatatccatcaattattttctatgttttagtaaacctagacacatatccacatgatttttttttggagaggaccatctcgatattatattaatgaattaatattatctgtgctggagaagtcttgaataatggaagaagtcgctttctgcagtaaaggtgaattaaaagagtaaaatgaaaagagacatggtgaagtctgtagctaaccatgattctttaaggccaaatacaccgacatagatgatttgggtgagcccgagagagaatataattgtgttgtgtgcaattggccaataaaaatcacctatgacatcccttatttgatacacgtacacatattacattagcatgtaaggtcaaatttagggcaagtaagaaaaaaaaaataaagtttctagcttctcatctgattatggtatacaacacgacccacttaaaagtacaccaggagaaaaggtaagatcatatgagtcaacacagagcatgtgaagcctagtagtccgaacaatagaacttttgacacttctttcgggtagagaaatgtgggaacagattatatattttctatccttaaaacatgtttccttataatgttacatatcatctgaaagggctgtaaaagtttagacaacaaactggcccacctcctcaaaacatgattctctatcttctctcctcaaaacatttttccttataaagttacgtatcatcaacaatgttctgaccttatgatgggctaacttgtcatctaaacttttgtatctttttagctgatttgtaactttataaagaaatatgtttcgagaacaagagaagacacaaaatcttttccctcgcttccctactagaaagaagtaccaaaatttatattgttcatactagtagggttcacatgctctgtgatggctcctctaatcttacctttttttcctagtgtaattttatgttggtcgtgttgtataccataatcagctgagaagctagaaattgtattttttcttactaaccccaaatttgtccatacatgctaatgtaatatatgttatttttagttgttcaatgtgtatcgaacaaggtatgacacatgtggtttgtattgacctattccacacaatacaatcatatttactctcgttgtcacctagatcctttatgctggtgtatttggctttatagaatcatgggtagctttagacttcaccatgcctcttatcatctttaatcttttatttcacctttactatagaaagcggtttcttccattattcaagacttttccataacatgtaatattagtttcttaatattgtggacatgttcctctaaaaaaaatcatgtggtgatgtgctttcgtttactagagcttagaaaaataattcatgggtagagtttgtcatgagcgtgagttgctctcttctcttgtggtattgagtgctacctagtgattgtgtatgatttagttgacattgatagggaagatgaacgattaggaagaatagataaaattcaccacaaacgctattctaattgccagttctctgatactaaagatgaccctttgaggaaattaaaactattggtgggtatgaggagaaatgttcttggtcgggtacgtccactagcaaagaaaaacacaacaatcccaaaatggacttgtctcacctgttaatcatctttatcatgttgtaaggtcgattatttgaaattcttctttattggaagatggccaaggcataaatgtggggaacagactcttcttcttggttgatttagagaggttaaattcttaagtatgatttggccacatggcaaacattagtcattcaccaacctcactttgttactacgctcatggaggacgtacgatacttatagcacctatatagaaacacataaatctacaagcaatcaacacaaatcaccttagccatcacaatagtcatagcatgcaaatcaccctatgcacttgaacaagaaagtgttgtctacttagtctaccaagcaataaaataatcattaaaaacacaataatcattagaggaatcaatagcccaagtagcatcacaatatgaataaagctgtgaagtgtagaatgatggaagaacaagcaacaagtgacatgacacagtcccataaagataatgcaagacatggagcatgtgttataatggagctgggaaggattccagcattaggcaaaaaagacaaagtggccgaagcagcaagagactcgtgattcgaaactgggcctaggagttcataatgacacaaagtataacaatttgatccgcaaagatgacctaggtgatgactaaataatatcgctatatattcagacaaaattagaaaaatacaaaatgaattcaatttgatccgcaaaatacaaaatatcgctata

SEQ ID NO: 378 - DNA, 1427 bp, Zea mays
  source 1..1427: mol_type = unassigned DNA
gtccatggcttgggtgtgacagtcacggtgattctagacccagaagaatgtagtttacttagaatttatgctgagttgtggttgtatggtggtcaatttatgattgatttttcttttttacgggtgctggaattaggtgtattttaagtggtcaatgggttattgagttggtgggtataaacagtattttatatttggcataaacagtcacatttatcttagctgcaaatggagttatatgcaaccttccatgtcatatctaacattatcataccgactcttctccatgctatgtgcaatatttctgacctttatgatgtatgcatgctttttatgaaaatgctgggtgcaatatttctgaccttttatttgtgcatgcttatgaaaaaggttccgtatatagctaagcagcatgtatgcttgtaatctaagttaagattagacatatagtttgctcattgcaatttagtcacagtttcatagtcaaggtgttctcattacagatagttgttaaaagtcaaatccttgctggtggccgagggctgggaactttcaaaagtgggctgcaaggaggtgtccatattgttaaggctgaggaagctgaaagcattgcacgtaagtgtactatagcaattacttgaattcaatatgtattgctggcatgctgtgatttgatgaaggaaaaaaaaactatagcagttcttcctagattttcttagatttctttcccgtcaactgttgctatttgcaataatgaaacttatttgtcattgcaatttgcattcccttgtttatgattaaagccaaaaaataaaaaaacatagaaggccaattttactttctatgaactggaaggacaagcacatacttaatttctgttctcatacattaattttattttgaattgatgggtgctgaaatttgctaccatgaaactctacttgtacgatgaagtgcgcatgattactttcttgtttaactaggtggatctgtatcaggaatattgctacgtggataaatctctgtgttcacacatttattccagaatttaagattgtttattcattgtgattggttgattggtttcatgcaagtcagtcatgtttcgggtatgtattttaatctctgatgagtcctactgatactgcaggtaaaatgttaggccagattctggtaacgaaacaaactggtccggagggaaagattgtgagcaaggttagaacttactaattgaggccatcttttgcttttattatatgtttctgtttgaaccgtgattggcttcatgtttgctctcagtctgttggtgtgtttacctgttagttcatttactctctgtagaatttgatatgctatttcttcgttcttggtctgtttgtgtttgtacccattactttcctttacgtcgagctgttaagaacattaca

SEQ ID NO: 379 - DNA, 823 bp, Zea mays
  source 1..823: mol_type = unassigned DNA
ttctgtacttgagttagtatgtcaataataggaaattcgtactcttatatgagaacacaaagtatcacatgcatccattttctcttcattctccattcttatgttcatgtgaaacagtaacagcaggattgcaccacattgtcataaaaaagtactccctctaatagtaaatatggtaattttacataaagtaggtaattcattttctcttcattctccgttcccatcaaagtttaagtttaactatgaccagtaatacataaagtaggtagattgacaacatgacttccatgttacgagatttttcatgtaaagtaattttacaatatgtaattcttattattttagcattgtcaaaaaactgaagtaaaatttctaccttttagacggtgtaaatgtccaagaatgcatagttgttgtagggaaagggaattagtgtacatgatatctgattgtttctgtcattcactcattctatgactttctccttaaccttatggttagatttatatttatttactatttttaacatgcaagactatcttaatgcttttcaattgaaatagttctacataattttgcttcttatgattattctgtatgaaagtcattacctcatacttttattgtgcaatatttccttgcatcgaagatttcgagagattgatactctattctcttcggcaggtctacttgtgtgagaaactgtctcttactaatgagatgtattttgccatcacccttgataggaaaactgctggtccggtatgccatttatctcagatattactttactttgctgttcattttataatttctatta

SEQ ID NO: 380 - DNA, 995 bp, Zea mays
  source 1..995: mol_type = unassigned DNA
tctagctagattcactccgctcccaccgtttggatttgtaatgtttgactacgtacgtggaagtgattcgagagctgtcccgccctaaatggaaaaaaaaattaaaccgtggacggtatagaatgggttggacgccgtggcaagcaagcaacaccgaatgcctgcatgcatgatgcatggcacagtcaaaaggaccagctagcgagtgtaacgtgcctgcctggtgtactacggtttggcgatatgtatgcatgctaggacttacaggtgtatggactatggaggcttctcaccgccacatcgcattcaggctaaagcgaggcatcaagtcatcaacagctagctagctagctagtatagatgggacgcacgcgtacgagtgtcaacacgtgaacaattcagaatctacgacccccgggggccgggggctaaagcgatcgaggcatcagcatactctctctcggtttctttaagcatgtgtgataatgatcccgttattattgcatatataggagtgatgacgattccatttcaaagaaaagaccacacgtgcgttgaaagagatctgtgaatgagctagcagctagtagtctggaaaataaactttattcgattcgatcagagctcacgcacgcacggctgtcatcagccggatgtgcactgtaaaaagggaagccggccggcgaaagtccggtccgagtctgctctagcggcgctggctgcactgcacacatgcatggttcctgcttgcttgcgtctgctgcaggacgatgatgatgtgaggtcaattggattcgatcctcctcctccagtttttctttggagcagctagctgcaacaaaattccacagtcgcacaattgactacttatttttttggggaaaaaaagaagctcacttcaaatggtcatgggtcgcggtcggtcctgactcctgattctgctgtgtaagaaaaaggagggaacaaaaaaaggtaaaaactaaccaagtagacaa

SEQ ID NO: 381 - DNA, 1998 bp, Zea mays
  source 1..1998: mol_type = unassigned DNA
taaaacagatttctaaatttacaaactcctgaccaaatctaatttgatccctacatttatcatcttgttgggactcttgaaataaatgtttttgctaagatattgcgataagcatactctgactacggtttcgccgtctctttatctgccaccgctagataacctcttgtgccaaggtgtcgctagagcacctcctgtgctgcctccatgccgtagttgcgagggcgtccgtggatagtgtgtgctgttgttgcaatcatctggtccatcgacaactccgacctcccaaaacgttaaggaaggttattggtataaatttatgccatcaactcgatttaaaatagaaagtatgtcttttttttacattgacaacttaaaaaattaccaaccaatgttggagcataaacattttttactcaagtgttatagtaactttctctataatttagaatgctaaatttacataacttggattgctttatgtttgtcttgaagtttgatcttcaacagcccagggatataccaaatttaaagaaagctccataaatggtgcagttggcccgttaagtcagttattatgcacccctactgatgatagaatttggcaaaggtcattgttgttagttgtaactgctcaacattaaacctaaattaaagcaagtattatttacaccaggaagttttggccatatccccacaaaaactcacagaagaaattaaaattctctatatacagaagaacaacaaaagctgaatcactagtactttcctctgtttcaaacttttcagtgtatgccaagagcctggaatctcctcactagagcaagattggtcgcgttcctcctctgccagtcctccgtgctctccttcctctgctccagcttgtccagcacgtcttcgttgccgtccagaatgctcgcgatcttcctcatgctcggccgcgccgccgggtctgaccgggtgcacgccatgccgagccgagccagccgcacgagctccctacggtcaaacttgccgtccagccgccggtccgccagggcctccaccggccggtcctgctgctcaaggagctggaccttcctaacgaggaggacctccggcagcctcccgtccacggccattgtgccggtcaccacctccagcaccaccacgccgaagctgtagacgtcggccatggtggtcgcctcgcccgtgtccatgtactccggcgacatgtagccgaagatgccccgggccgagctggcggtgaccaccacgtggtgcccgccgccgtggcgctcgttcctcgacaggaactcggcgagcgcgaagctcccgagccgcgggttcatgtcggggtccaggaacaccgccgacgacgtgatgctgcggtggatcacctgctcgtcccactcctcgtggaggtacaggacggccgacgccagcgccctgacgatgctgtaccgctgccgccacgggaggaccgcgccgcagtcgcgccgccggagcaggtggtggctcaggaggctccccggggagtagtcgtagacgacgagcatctcgccgtggtccgtgcaccacccgcgcagctgcacgaggttcctgtgccggagcttggccacgttgcatagctccctggcgaaccggacgcgcagcgccgggcacgtcttcatgccgaggcgcttcacgaggacgtggacgcggccgtggccggtgtccaggaagccctcgtaccctgtcccgaagtccagctccgcgaccacctgcgactcggagaagtcgttggtgatggcgacgatctccttgtagggtatctcgcgcggcgtgtccacgtgcgggatcgccacgggcgctagccgagacgacgaccgccggccggagtcagcggacgcggacctggaaccggtcgtcctcccgtcttccgcggtgtggtagatggtgtccgcggccgcggtgtcgtagacggggttggaattggttagagacgtcgccgccgtgctcctgtcggtggtgacgtga

SEQ ID NO: 382 - DNA, 2132 bp, Zea mays
  source 1..2132: mol_type = unassigned DNA
agctagcatgttgcattatatctataccgaggaagatggtaactgtgttgttagcgataattgaaaatttaacattaagtttgttgcaatttcttatccccttgagtcatatgtgttggcaaactgttgtttatgtaatactgatgtattaccactgtttgatattttccattttgttctttcataggtgactttctccttactaagttccatttatttgcttcgttgttgaaataggttcgaatatggagtatggaatctgtgcataaggacaataccaacaatgattcgaagcaaaggttgcttgctacactgcgtgatcattttggatcagtgaactgtgtgagatgggccaagcatggccgctaccttgcttcaggatcagatgatcaggttatcctaattcacgagagaaaagctggctcaggtacatctgagtttggtagtggagaaccaccagatgcagagaactggaaggtcattatgaccttgagagggcatactgccgatgtggtaattatcttctaaaattccactgtgctgtgtttatgtttgtgataattattttgtaactatagaacaccttttccatttcttgtgcataaggtaggtagatcttagttggtcccctgatgattcaacgttggccagcggtagcttggataataccattcacatatggaacatgaacaacggcatttgcactgctgtcttgcgagggcacaccagcttagtgaaaggggttacctgggaccctattggttcctttattgcaagccaatcagatgataagactgttatgatatggcgtacaagtgactggagtcttgctcacaagacagaaggccattggacaaaatctgtatgtcgtatttttttatttctctgttagatctagctgtgatcaacctgtcttactgaatgcctttctcattttgtttgttcctgcagcttggttcaacattttttagacgacttgcttggtcaccttgtggccacttcataactaccactcatggtttccagaaacctaggcattcagcacctgtgcttgaaagaggcgagtgggctgcaacttttgactttctagggcataatgcgcctattgtggtagttaagtttaataactcaacgttccgtaagaatttctcaaatgaccaagacccaaaggctgcaccagttggatgggccaatggagcatcaaagacaccaacaaaagagcagcaaccatataatgttattgctattggaagtcaagatagaactattactgtttggacgacagcgagtgcccgtccactatttgttgctaggcattttttctctcaaagtgtggttgatttatcttggtatgagatgtcaattatttctctacaaccattattaacttgtatgctcaaactcatgttgatattgtttgtttcccttgcaggagccctgatggttattcactttttgcctgctccttggatggatcagctgcaaactttcactttgaagtgaaggagcttggacacaggttaagtgactctgaaatggatgaatggaagaggaacaggtatggtgatgttggaggacgacagtcaaatctagctgaaagccctgcacagttgctgctagagcaagcatcagcaaagcaatcagctggagaaaaggtgacttcaattgtcgagcaaggtaaagcacccccaaaagtttctgcaggtgtgcctaacccaggtcttgttgtgctaagtctcgaagttcctgaagtgtcacatgaagactctaagaagacagcaggtccaactgctgatgatgtaaaaaaaggcaaccagttatctagtccagtgaaacagagagaataccggcgccctgatggccggaaaagaataatcccagaggcagttggatttgcttccaaccaggataacatacccaaccattctcagaatcatcctgtgaatttttcatccctggatcaacgaatgaatggaacaaaaccatcttatggcagtaacagcaactctaataactgtggagttaaggatcgcactagtgtcacagcaagggcaaacataactgagagtcttgttattcaaaaagcttcagccggtgctggcaatgatggaaggctgagtatagaacacacc

SEQ ID NO: 383 - DNA, 1956 bp, Zea mays
  source 1..1956: mol_type = unassigned DNA
ctccatttttactttcataaaaactctacatctttgtcattgattttctatgcgttaaaaaaataaacatttctatgatttacagaaaaacataatactcgttaaactatgaaaggatcatgatagatacgtctaattgatgcctgctatatcctaaggttggacagtcttcaccaaaatcattagttgcatgaaatgacctcaaataccggccttcatagctgcaagaaagaacaaaaaaagttcatgaatcaaaaaacaatgcatagacattagaaggtgtttatctaatatgagaaggtaatcattaagtagaatttagtgtgttctcttcgaaaagaatttggcatataatatttatactcacaaagaaaatgtgttttcctcataagaagcaccaaacctgcaaaatagaagtgaagcaaccgtttctttgcttgtccattcttcataaaatgtgattcatcagctacgacaatttggaggaaaatcattaagccacgtcacaatcattatgatggtttttccctaatggaagcaaatacagtcaaactaagccaaaaattgtctgaaaccaatttgaattgttttagtttttcaggaaacagaaggcgaggtagttacataaaggcaaacaattttaggaaatagcatgatatccgagttcacatatttaaaaatgctattagtagctataaatatgtaaagataaacaatttcaggaaataacatgacatcatgttcacacatttaaaaatggttttagaagctataaatatgcaacatattttccctcactctaatgactatgtcatcgttttctaagaaaatatgtaaacctgaaggatatactcatgtttatccaaatcacccataaaacatgaggtaaatgaaaaggtccagtgaatagtgatggaaacaaaataaaattgcatgtcacgaactacttttggataatgaattacacatggtgagtacatcattagagatggaccaatttgagttcgttgttggtgtcacaatacttacaggatggaagttctgcctattataaacgagcctactgctgcatcgccagtatatggttttgataaaaagaacaatgaaacaattctggttaagactcaagagaattcagtgtatggtgaagcttagagcaaggtaggataaaacacaaggaagaggagaggaaaatacatagttgatttgtatgagaagcacatgatatttaagataacagagaagaaatatatagccgacttccccataacaatttaatcttttgcgaaaatggcaggtcataaatgtggaataaatattccctagattaaccgatgctctaccaatctgaagtaccactatctacgcagtgaggaccgagaagcatttgttgctgccaaatttgaaggatgaaaaagcagcacataacgagtggaattataaaggcatatatcacacaaagtggaggataaaggactaatccatcaatgcatcagaacatgcagttagcatctccattactttccttgcacatgcctaaaacagttgagttgtcctaacaaactgtagtgaaatggtctatcaagtatcaagcaatagcaaaaatgtacaagagaatgagcagatactgcctacattccataatgataaaaacattctgaatagggaaaagtcatacatcccagaacaaaaggaagatagaaaagatgttccccagtgacatcgcatagtagcaaatttcatgctggaaatgagagaaaaatataagcaaaccaattcctttattgcaagcgaatgaaaatagatcatccaccaacgccacatgcagatcaacctctgcctcttcaatttctagatatgcacagttttcacagggttagcgaatcacatcaaggctgacccaattacaatataccgagaaacagtacataggcttggtggcggggcgtctggatc

SEQ ID NO: 384 - DNA, 530 bp, Zea mays
  source 1..530: mol_type = unassigned DNA
tatataatctagtaaaaaaggtaaattttaattttgggacggggagagtatataactgatgcttgaagtataatgattaaataatatattatcgatgctcgaaccaagtatattttataaaatcttgatcgcgttataaattagggagtaaacagggtaaaaaccaggcataaataagttataagcaatatatttatactttaataaacacgcgttgttccaagtggatcgggtaataataaaaaatgtatgcatgggatgcaaaatgattagtgctctcccgtagacccgtataccagattatagatctcaaactaataataatataatcgaccaacctaatctacgacaaagtatactccctaatctacgagaaaccgcgatacttctccattgtggccgtctacttgttctcctgctggtcgccaatgggcaaaatggtggcgcttgtttgtccgcctacttgtgctgctggtcgccggtggacgaagacccttgttcctcttacggagcttgtgcgagaggcatgg

SEQ ID NO: 385 - DNA, 1998 bp, Zea mays
  source 1..1998: mol_type = unassigned DNA
agttaataatggttgtagagaaataattgacatctcataccaagataaatcaaccacactttgagagaaaaaatgcctagcaacaaatagtggacgggcactcgctgtcgtccaaacagtaatagttctatcttgacttccaatagcaataacattatatggttgctgctcttttgttggtgtctttgatgctccattggcccatccaactggtgcagcctttgggtcttggtcatttgagaaattcttacggaacgttgagttattaaacttaactaccacaataggcgcattatgccctagaaagtcaaaagttgcagcccactcgcctctttcaagcacaggtgctgaatgcctaggtttctggaaaccatgagtggtagttatgaagtggccacaaggtgaccaagcaagtcgtctaaaaaatgttgaaccaagctgcaggaacaaacaaaatgagaaaggcattcagtaagacaggttgatcacagctagatctaacagagaaataaaaaaatacgacatacagattttgtccaatggccttctgtcttgtgagcaagactccagtcacttgtacgccatatcataacagtcttatcatctgattggcttgcaataaaggaaccaatagggtcccaggtaacccctttcactaagctggtgtgccctcgcaagacagcagtgcaaatgccgttgttcatgttccatatgtgaatggtattatccaagctaccgctggccaacgttgaatcatcaggggaccaactaagatctacctaccttatgcacaagaaatggaaaaggtgttctatagttacaaaataattatcacaaacataaacacagcacagtggaattttagaagataattaccacatcggcagtatgccctctcaaggtcataatgaccttccagttctctgcatctggtggttctccactaccaaactcagatgtacctgagccagcttttctctcgtgaattaggataacctgatcatctgatcctgaagcaaggtagcggccatgcttggcccatctcacacagttcactgatccaaaatgatcacgcagtgtagcaagcaacctttgcttcgaatcattgttggtattgtccttatgcacagattccatactccatattcgaacctatttcaacaacgaagcaaataaatggaacttagtaaggagaaagtcacctatgaaagaacaaaatggaaaatatcaaacagtggtaatacatcagtattacataaacaacagtttgccaacacatatgactcaaggggataagaaattgcaacaaacttaatgttaaattttcaattatcgctaacaacacagttaccatcttcctcggtatagatataatgcaacatgctagctaaaacagaatgaaaacaaaacaaataactctaaggtatcttattgtgctattcaaatttgagaccagaaacaatgattgcacaacaagtccctgttaaaagacaggttatctcactgatgcagaggttatctcagatattcccaatagccaatttcacgtaaatttatattacccggaaccaaacaagctggacccaagaacatagacaaatcctcactaaagcacaaaaagttaccaacaccgcagttagcgcaatgaacacacaacaaatgtcatgttattagcactgaaaaaaaatgtaagggcatgtttggatgttgtagttttgagggatcttggtatgaagaaattgttgttctagaaccaagagaagtgcaacaccacaatttaaataaatgtgctctagagtgcagtttcgaaaactcccaaatgactaaaattttagtaacacaatggttttaggatctaccaggtttgttacacccgaacacattatttccaaaaccaaattatcacacaagatccaaaaagggctaaagcatgaaaccataagccaaatatatagttttttgagtaaagtgcatttccggtcccttaacttgcgccgg

SEQ ID NO: 386 - DNA, 2472 bp, Zea mays
  source 1..2472: mol_type = unassigned DNA
tgaatggaaatggaacaatgtcatcgtgtggaaaaaagtgaaaaaaaaactgaataacactgcaggccaatgagtgaggcttgtaagaactgcgtgtggtgaggaattcctcccgcaggccgcggcacacactcagattcaatttagagcatgtggaatcaatcaaacacttactccagtgaggagcgagctgattcagccgttggagaagcacgggtactatttaaaccgctgcggatttattatagaggaaaccgacgttacctccgaagaggcgcccaacaagaacagcgggacgcctttgtcgtcctcggcggcggcgcggagctgtggttggacagttggagcgactcttctgtcggacaagacgatgagcacggcgcaccctactttgaggccacacgtccacaacagccgtccgatcgcacgacgacggcgcaaagttgaaccgagcgaggacgggtctgggctggctctggtttgagccgacgaccggacgacgtgcttcgcagttcgcacgaacaatctggactggagtcgagttctgcgcaagagcgggcccgcccaaaacaataggtggcctcctgctctcccatgcatctccgtcggcccaacaatacagagtggcccaacttctccaatgcgcaactgctgtacgctcgacgtgaaggcgcttctcccaatctcccctccgactcccgttcctgcgccccaaaccctaggtccgttcgcggcggcggtggactgccagtggcagctctccgctcggcttggcttgggcagctgccgcgccgcgcacctacgggcagcggctgggcggcccgcgctcgtggcagcactcgctgagactgagaccgccaccggcggttcctgggctggaagccggtgcagcagcaggcagtagccatctcggccgccagttccaaaccctaaccgagtaaccgcagccgcagccgcagccgcagggtgcaggcacgcaccagcctcacgccagccgcgccgccgctccggccagccgcaccccgtgccggccagctgcgcccacgaaggtgaaaagcagctttacttgccggcttggttttaagtacaattcacatattaggcttgtgtcatcaagaccatgactaggttagcatctctctgtttaacacttcaacatctgatattgcactgtttctgataaagttcaactcgagtatggctgtgtttcatactgttcgatgtgcccttacgctcggtgtttcttttcctgatttcctttctaaaaatagtttaatattttgggttgtaacactggaaatctgctcctttaacatttggaggtggttattccctgtttatcagggttaaaagccaccttttctttatttcttcactggaactctactttctagtaatatgacaaacaaggttaattggtgactaaaagaagtttgactctgaagttcattatgttgttaagtacagctgtggaactctatttgcaatatgtttacaatttattctgatcacgatcacattttaattttcttgattatatgtcagaattgcttaatctgaaatcttcagtccaagggaaagggaaagttccttcaggctattttaatgctctctataattaagtggagcttggttgactgatgccaaagagaccaagcatctagcttcgactgatatttcatttctttgtactacttgcacctaaaggcttctccattagttctttgagatgaagtaaaaaaaaaggctgttccatccaagtgggatcctgttgcattgtcattaggactaaacgtcggccatccttgttcattgattgtggatcagagcagcagtggcatttcaatagtctcgtgagggtaaaaaaacccaggcaaaatgagttaaaaagtttattttttatctttcacggctggttactctgggagagctgggtcgttaaatgggtcaccacctagcgccttttctaaccttgagtaggtttgttgtaagcatgcttatttctacctattaatctaaatgtgcagcaaatttagatttctgacgtcctttcagttgaccttgtttgcagttccattatgacaagttctcctgtcgtatactgttttcctttcgcttttgtatacccacggtattgatattgtttatcagtattttgtgtataggaatctcaacttctttgccgaggtttatcgacagttgtatttgttgggaaaagtagcagtttgactctatataatagagagtgccatggacggacctgagtctagtagaggtcgcagtaagcaggaggttgatgataatgttaatgcaaggaatacttggaaggaggagcaagaaaatcaggagaatgtggatagcagaaattattcggatatatccagaaaacatggatatgaacatgaaactgggcatcaggatgataatagaatgattacaccttcaaatgataggaatgaatcaaggaggaat

SEQ ID NO: 387 - DNA, 1900 bp, Zea mays
  source 1..1900: mol_type = unassigned DNA
ctgagaagggactcacgatctcctaaagttcaaaggagaagccctgatgattccaaggatcgagactatgatagaaggaggggaagaggggacaataatgattgggaaccttcaagaagatttagccctgatgcttctgctaggagttcagagagaagagagggtagtagggagaagcaaggacaacgggatcaagatgaaagggcatcagtcaggagggtagatgaagtttatgttgatgaaactggtggttctcttagagttgacacaagagaagcttatagagatgataaatctgacagagggagggataggaattggaatgagaaaacccgagacattgaaggttctaaggactatgggaggaacactcaattacgagatactaaggagccaaatgattttgaatggaggaatgcacaggaaaggctagatggcgggaatttccatggccgaactggatatcggagagattctaggggtagatctgaaagtattagaggtccctcaaactatgggaaccgatacgacaattcagactcaatagagattcgacctaatagtaatcttaactttggaagagagggctctgtttctggtagaagatttgaaaccggagcacaccgagattcagtacctggaggaactgatgataaatcctctgatcatcttgaaccagatccaagtggtagcacaagcatggtttcttcgtttcctcaacaaggtccaaaaggcgataggtcatctagaggaggaaggggtagaccaaatggaagggattctcaaagaattggagttccaatgccaatcatgcctcctccatttggtcctcttggacttccaccaggaccaatgcagcatatggggccaaatattccccattctcctggtcctcctctcctacctggcgttttcatgccgccatttccagggcctctagtgtggcctggagctcgaggtgttgatgtgaatatgctttctgttcctcccaaccttaccattcctccagttgctccagaacataggtttgcaccaaatgtgggagctgggtctagtcataatatccacttaaatcaaatggacactgggttaggtggtccagcagatatatcaggtttgggttacaataatatgggtcctcaaagccgtgaaatgctccatgataaacctggttggatgccacataggaacagtggaccaaacagaaaagctccttcaaggggcgaacaaaatgattactcacagaactttgtggacactggcatgaggcctcaaaatttcattagagaactggatcttacaagcgtagcagaggactatccaaagttgagagaactcatacagaggaaagatgaaattgttgctaagtcagcttcaccgccaatgtattacaagtgtgacctgcgggaacatgttctttctccagagttttttggtaccaagttcgatgttattcttgtggatcctccatgggaggagtatactcaccgtgcgccaggaatcacagatcacatagaatattggactgctgaggagattatgaatttgaagattgaggttttccccttttctttatcctttctattttgtgatttcatttatgctgcagaattaatatttagaagtgtattttttgaatcaacaggctattgcagatacaccctcctttgtgttcctttgggttggtgatggtgtaggccttgaacagggtcgtcagtgtttaaagaaggtagagcctgctatttccgtacttaaatgactgcgctctatattattattgtaatgccattcgttttgggggatggggtgggatcttgaaatcattttttaggaggtcacccaggttcccgcagcttcaaatcaatttttgccctctgatgttacttctcggacatgaaga

SEQ ID NO: 388 - DNA, 2127 bp, Zea mays
  source 1..2127: mol_type = unassigned DNA
ccgcgacaacttgtccacggtggctccgacgggaggcgctcgcccaccaccgttttggcatcttccccgacatggatccagcgcctccatatcgatgtcttcctcaaatgctcagatctgccccctccaccacctctagcctcacgccgcgctttgacagctttcccgcctcggatccagacgccccgccaccaagcctatgtactgtttctcggtatattgtaattgggtcagccttgatgtgattcgctaaccctgtgaaaactgtgcatatctagaaattgaagaggcagaggttgatctgcatgtggcgttggtggatgatctattttcattcgcttgcaataaaggaattggtttgcttatatttttctctcatttccagcatgaaatttgctactatgcgatgtcactggggaacatcttttctatcttccttttgttctgggatgtatgacttttccctattcagaatgtttttatcattatggaatgtaggcagtatctgctcattctcttgtacatttttgctattgcttgatacttgatagaccatttcactacagtttgttaggacaactcaactgttttaggcatgtgcaaggaaagtaatggagatgctaactgcatgttctgatgcattgatggattagtcctttatcctccactttgtgtgatatatgcctttataattccactcgttatgtgctgctttttcatccttcaaatttggcagcaacaaatgcttctcggtcctcactgcgtagatagtggtacttcagattggtagagcatcggttaatctagggaatatttattccacatttatgacctgccattttcgcaaaagattaaattgttatggggaagtcggctatatatttcttctctgttatcttaaatatcatgtgcttctcatacaaatcaactatgtattttcctctcctcttccttgtgttttatcctaccttgctctaagcttcaccatacactgaattctcttgagtcttaaccagaattgtttcattgttctttttatcaaaaccatatactggcgatgcagcagtaggctcgtttataataggcagaacttccatcctgtaagtattgtgacaccaacaacgaactcaaattggtccatctctaatgatgtactcaccatgtgtaattcattatccaaaagtagttcgtgacatgcaattttattttgtttccatcactattcactggaccttttcatttacctcatgttttatgggtgatttggataaacatgagtatatccttcaggtttacatattttcttagaaaacgatgacatagtcattagagtgagggaaaatatgttgcatatttatagcttctaaaaccatttttaaatgtgtgaacatgatgtcatgttatttcctgaaattgtttatctttacatatttatagctactaatagcatttttaaatatgtgaactcggatatcatgctatttcctaaaattgtttgcctttatgtaactacctcgccttctgtttcctgaaaaactaaaacaattcaaattggtttcagacaatttttggcttagtttgactgtatttgcttccattagggaaaaaccatcataatgattgtgacgtggcttaatgattttcctccaaattgtcgtagctgatgaatcacattttatgaagaatggacaagcaaagaaacggttgcttcacttctattttgcaggtttggtgcttcttatgaggaaaacacattttctttgtgagtataaatattatatgccaaattcttttcgaagagaacacactaaattctacttaatgattaccttctcatattagataaacaccttctaatgtctatgcattgttttttgattcatgaactttttttgttctttcttgcagctatgaaggccggtatttgaggtcatttcatgcaactaatgattttggtgaagactgtccaaccttaggatatagcaggcatcaattagacgtatctatcatgatcctttcatagtttaacgagtattatgtttttctgtaaatcatagaaatgtttatttttttaacgcatagaaaatcaatgacaaagatgtagagtttttatgaaagtaaaaatgg

SEQ ID NO: 389 - DNA, 1235 bp, Zea mays
  source 1..1235: mol_type = unassigned DNA
gatatcagcactagtagttgtaagtgttggaaacaaccgcaccgtccgatggctaccgttggaccaaggcgttgctactgtgagatgaacaatgcgatcgtaatagttcgacacctctcttcgctaacgattagggttagcttcaaaagtatggtacgacgcctccaacgggacggtcgatgcctaaacccaagctttactttgtttcttcgtgatttttttgcgtctaacttagatttctgtggctagcttggtctccatctttaataacttttataatattcttttgtcaagatgttgatcttctcaatcactatttagcattcaactaagttcatgttgtatcctttaaatcatattcaaaaacactggtgaataatgttaatctaaatagttaaaagaacactggcaaataatattagtctaaatacttaagttgatcaaaacttaactatcatccattaaataaaccttagtcttcttatagacacaaatctgacaaaaaaaatacatggtatgccttgccgtccttgatccacgtagcacaactaccaatgaggtagggtgttgcaaaggtttcaagcgagacatcggataagacaatcctatgtcaagttggatcaaataacatcagacgatagaagtcaggagaatcaaagttgacaagaacggaaacaaattgccctcaaactaattatgccgcaggcaaataaatacggtccaactaatatagcagtaacaattatcaagagtcgatcttcatcaggctccctaagccatcatgatcaccatacagatatataaaaggtaccgaatgacttgcacaaaataaccacagcacatcgatctaaagccaccgtgatatcacaagtcgagttagaagcagccgaacgatatcaagagcttgcattgcgcatcaggttagcctcttctgctgcagcccagccaaaacttccttaaacttgcgttccacaccgctgcacagatcctcatacccgcaacattccgtcttgatactcacgacctctgcatctatttctcccttctcctttgcaattttctggctttcctggcgaatacggccaagttcttgctcgagccgagctgcagcttcatctttttcatcaagcagtgcaccggctctgaaagaggaagccatcttctctactaactttgatctcagcttgccaatttctccatgataactgatgcgctcagatttgagcttgaccaat

SEQ ID NO: 390 - DNA, 1099 bp, Zea mays
  source 1..1099: mol_type = unassigned DNA
gggagattgtcctgatcttgtcatcaaaccatcccatgtcgttgtctatgcttgcttccattgtaaccttcatcaagttcgcaaatgacaccatcatacctaatgccattccttcacacagtgttggggggagttcttggagtggaaggaaatgtggtcgttgaggtgactccttaaacacatgcattgcttcaactatatgccatatagatgagcgcttgacgaacaaagcctgctgtgaaggcaacaacaagctcccaaaagaagagcaactcaatggagaactgtcaatgatgcactgtaaacttccagcattctcaagacgtaaaactgacctcccatccacttccccacaggattgttgagccggacaatcaataggcaggatagctgttcccatcacatggttgatttcagctaacctggtagtagcagcatggtctgtgcgcatgtcgttattttcattcggttgaatatgactgttagtcatacccgttggctcttccacttccccacccccacaaagttgttgagccagacaatcaatagacaagatacttgtttctatcacatggttgctttcagtcaacttggtagtagcaacatggtctgtgcacatgtcgtcatttttattcggctgaataacagcatggtctgtgcacatgtcgtcatttcccttcagttgaataaggttgttagtcatatccgttggctcttccacttccccttccccacagggttgttgagccggacaatcaatagccatgatagttgtttccatcacatggttgctttcagctaacttggtagtagcagcatggtctgtgcacatatcgtcattttcattcggttgaataaggccgctggtcatatctgttggctcttcctcatgtagagtgtcatgtatgttagtacctgaacacagaaatccaatcattaatctactacatttatgtatgccttcagttatgtagcaaactatgcccattttgaccatgggtagagtttctgcagttcatacctttcctgttagacattgatttaaagctaggaagcagcatggataacaggttctcctcatttgataattcagttatat

SEQ ID NO: 391 - DNA, 2863 bp, Zea mays
  source 1..2863: mol_type = unassigned DNA
cggacactccaactacatgtaaaatagtaaaaatctaagaagctgatggctaatataagtattagtctacaaaagaatcttcttactgctaagagacattcttccattggctctgccatttccttgcttcctccctgctggtcagtcctggtcatatccaatgagctatttagactgcacagtcctttcgatcctctcttagccactacacattgtacgacaactgttagatttaaattaccacctataaatatgaatgtgttccagagaaaacacttacatttcttacaggcaagaacctttgtacttgaagccctttttcttcctgttgactcctaatatagattgaccaaaaagaacagaacaaaaaacatgaatataaatacagaaagggtgtttaaaagccaatcataactcataagtctgtaccatggaaaaaaaaatagcgcgcaatagcggcttagactacatgacgcaacgatattccgtgttttcgcactaacgcggcccgggggctcaccgaacgcggctgcgcggcacagggtctcggcggctgggcgacggcggctgagtgaagacacctttacgcagggctggttactacttgaaccctttctattactatcaaaacaagttggctatagaggagaatgaaacatttagagatggtgtaatcacttgcattaccaggcttgttccaaatgaagataatcaagacaagattattgaagtgctgcaagtgtttcaggatgctgaaggatcctttggcaaagaaattgctagaaggcagtgaaaaaatatcaattttgatccaggtatgaaaaattgattaacaatgtcctagtttataaacaatgtcctagcaatgaatcattcatcctaaattcctaatttacattgtcctctgtttttcactttttccttagctaaatggtggctgaattatgcaagtagtgcaccaaacctcaaaaagttagatgcgagatttctaagtttgacatgcagttcatcaggttgtgagagatgctggagttcatttgaacaagtatgaatttcacacgtactgagttctttaatccattttttgttagacttattgaaataaaaaataatgaaatcaaacctatgcacgtccactcaaagagacgcaacaggctccttcatgacagaatgaaggatcttgtgtttgtcaagttcaactcaagactaaagcaaaagaaagacgacaaggataaagatcccattgagaaacctgtccatgatgttgttttagaagatgaagacgacgagtggatcactggcattgagccaacagaaggagatgaagagcaagaagaagaaactgaaacatcatcacaaggagttgcagctgcatctcaaagagaaagagaagagagaactaagagagttaaccagcagaaattaagaaacaggaagagaaataggttaatccctagtttccctacatttgaggaagaggagtcatctccaccttctgatggagaagataacaatgatattgatatgcatccttccgattctgaggctgaaccatagaagtcattgctctaatgctcttggattgtgaacctatggctgtttggtatttgcttatgtacttgattcttgatgccttcatggttgaattatgaacttaattatgttggctaaagattatgttggttgtgaacttgtggctgtggttatcatatattgtgtgttgtcctgttcttatgaattttgaataaaatagcgcgctatagcggcgcaatagcacgagcaagcagctaaagctactgcactatagtgcggctatagcggccagaacaggcttccgctaattttgatagcgccgcgatcaaaaacactggtctgtaccagtctatctggagatgaagtagtctggccaaccctatacatgcccaaatctaaaacaatgtccctagagaaattattgttttccttccactgaatctgcaccagcaaaaagatcaaaattagcagaaataataaattctatgcgggcattcttactcccccaacaacaaaacataatgaataagactcaaactattagagagacccacatttccctgaagttcttgaatagggtgtgttttcccgtctttactattcgatatacatttcttcactccgagcgatttaaaaagttgtccctctgtgtgttggacagcatgatttctgcgagatgaagctattttctttcttattccagcagtggaaacaataccatgggcatcaacatttcttccacacatagatccatgaagctcaccatccaaaacacccatatcagacaggatttcttggttgtccactggtgctgaatgtcctgaagaagaacaaagaagtccattcatttgaaccgaattcactatcccgtgtgaaccttgaggactgttcttttcagagagcaaagaattcggtgaatggatgctttcaggtgacttgcacatagctgacaaaggaatgcccatctcagagactgaagcatgttcagaaccttcaactaatgtggcatatggcagcttcagttctttcgtagactttttgatgaaagaagaatcaggatcgtgactgtcttcttcaccactggatgtcaaatcaattggtgagatttgattttctccacgcttagatcgcggcctcaagttagtctgtctctgcacaagaaaatatttagaacagatcatacaagttgaatgatagggtgttgtattgttataagctaaaaactgaaagattctttagcaatgtgctatatgcctatatacatattgcatgcaaatggttaagcaaatttcttaaactcgcaagacagccaatacggtagaaattctgc

SEQ ID NO: 392 - DNA, 501 bp, Zea mays
  source 1..501: mol_type = unassigned DNA
acgagcgccagaaagagagagtaggaggcgtgtagaagaagtatgttgactgtttgaacaaaggaggagaaatgacgaagaaatatccagatggagggcgccgcaggataaaggaaaagggaatttgtccactctaatttttctattatttcctcttttctctctttttaacacaatggatacaaaaatatcctatatctagaatcagggtttgaacgtgatgtaaatggctggctttgacattttaatctgtgatagattctcgacgaaactaaatcaattaacaattagtcgattttggatctatttaccttggtccaacatattttgcaccaataatttttaccaccgagttctaacaatatttgcttaagacaaaatcatatgacgaggtttgagcctccaaattcggtgttgcttacaccaattaatcctaagcgggcaagagactcgatatttcgtggaagaaacaaattctgaagtatgccagacggacgcaac

SEQ ID NO: 393 - DNA, 1972 bp, Zea mays
  source 1..1972: mol_type = unassigned DNA
tagcccacgttaaaaaagctaaaatagcaaatttttcgacgacgatgggctcctcgagcccatggccacgactagcattgctactcgtgacagtcgcatatatgaggaagagactaccaaaatctagactctaggctaactttaacaaggtgacgacgttcgacggtaaatgtaaaaaggtaaggatctttgatatcagcaaaccatgcaagagtactgtcggagagaaaaaaatattaaattctctgagaaataagtgaaaagtaaatttgttgcagggaaagatacaatgtttgatgggctacagtaaaaatatgttgaacaatagaaaatacagtggcagtatgtctaaactacggaaaaagagtacatagttataaatgtttttttcatgaaactaaatactactttgtagtatagttataaatgtttttttcatgaaactaaatactactttgtagttgaagtacagaagagagaaaccatacctctataagttggtagccaaataattgtagccccgcagaaattgttgctattaaaacaatttttagaaatgtataagtgactttatgtagcagcacccatatcgagtagtagcaacagctcgaatgaaaataaactatatgtcagatgtatagaggacccatggtggactgccatctcgaaaccatacaaaaaattcttatgatgccaacagagaacaaatattgatagcaagagaaacgatggaagtcaatttaagataactataaacctttctccatgatcataaattgaatgttgtttaaaaatgatatttgagatctttgggaactcatctccatgttcctgtttatgctatctctgaatgaaatgttcttactcctaatgaaaataacattatagaactaaaatggccaaaagagcgatggaagtcatctttaagataattataaacctatctccatgatcataaattgaaagttgttataaaatgatacttgagatctttgggaactcatctccatgttcatgtttgtgctatctctgaatgaaatgttcttactcctaatgaaacaacgttctagaactaaaatggccaaaagaggtgtcgaagatcataagtgtataattatcagtataaacctatctccatgatcataaattgaatgttgtaaaaaaatgatacttaagatatttgggaactgatctccatggtcatgtttatgctatctctaaatgaattgttattactcctaacgaaaacaacattctagaattggaacggccaaaagagttgtcgaataccataagcctataattatcatgaacatttatataccaaattgtcactttcaggaagacatttacaatgaaaataatctggtttctgatttggatataacttttttgtattcaagcgtaagagaagaaggcagtacatatgtaagtcatcaactgaaagtgctgttctttacggagaatcattgttataatgaggaaatcagggaaactacatgagtgccaaaaaaacatgacaatactcatattgtttaccaaataaatgagtagactatccatatgatgtaatcatatatggggtccaaaccaaaaggaaatatagaatcatacgcggtttacaacattacaattgtaaaccgaataagtgttgttatttacgaagaatcgttgttgtaaacagaatttaggaaaactacatgtgtgccaaaaagaaagataacagtactcatatcgtttaccaaataagatgactatccataaaataagtagactatccatatgatgtaattatttatgggttgcaaaccaaaagctaatatggaatcatatgcagtttacaacattatgagaacagtgcttcaaaaattaaacaaagactatcggaacccaaaaaaacaaaagaatggtcacctaattcagtaacggaggctgggttgcactaattggattgattgattgtccctaccta

SEQ ID NO: 394 - DNA, 4152 bp, Zea mays
  source 1..4152: mol_type = unassigned DNA
aatgcagaattatgagtattattgatggcagtttggatgctcacctctacttccttggctgcttctgcaaggtcctcatccatcgatttgctaagagggggcatttcaatctgggtatagcaacacagcatgagcaaggtaaagaacgaagaaaaaaaaaggtgttccagagtatggtcctacaaatttcatgtgactacagtaatgcactagctagcgtgcagtgttttataaattgaaatctacagagtgaaactaaatatatttaactacctctttcagtcgaggtaaggttgtttcgatttttttccctgcaatgttatgaaggtaaccatacagcttcttcattgtctttatgaagttcgatagaacctgttccctttctatcccgagctcttcctgtgattaaataaattagagaacagctgtgagaaatcttgatgagaataccaagtactttggacttgcttgggattaaacttgagctaaccttcacagtgcctatgtctttgtcctgcaggcctagacaaaacaaaacagctgcttgggcaccatgtaatgacactggaagcctctctgaaaaatactgatgtgcaaggatgggtacaagatccaggatctgaaataccaatcgcattcaaattcagagtgatgccttagatgcaaaagacagttatttcacagcacagcagaaaaatatactctgcaaatgcatcaaaactacatacaccttatatattctgaattggataattgggtttcttaccagatgataatcgactaaattgtttgaatacgcctctagtcgtttcatgtcatgtggtgatagcatgtcttccaataattttgaagtgctattattatcgtattctgaaggctcatggtttgagtaatcaatcttcgaagccaagacactagaaaatataaataaaaaagaaaaaaaatcagaatacagaaaaaatactgcactaatgtagttcaaaagtgcatacctcattgcaagcttaaaattaagatgccggaaagaagttcccaaaagccgcctgaatctttgtctgaaatctgaacataggtttcaaatttagctaatgcacccaaaaaaactttacgtaaaaaacgatgcaagaaaaaacaaaacaccatctgtgcatctaagattaggaagtttaaactaaatttgtttactgaaattgtggtaaatacactaagcagtttcagctagaaatgtaaaatagattgaacaaaacacacaaaaaatagtaccttggtaaaacggatccaaaaatccatgtttgtttgactcactaacttcgatgtcatcactgtttaagggtctcaacaccatacaggtatgctcaccagtaacagcactctgaaaaaatgaaatagcaataagcacaacagaaggtgaaacactaagtactgtcaatctgttatggcaagtccggttagatatgattactggaatctggccgacatagaacgggtagaagttgtgcttccgccaaaagcggaaaagctcttgggtcagtccaaaagatacaccaagataatggagcttctcaggacgacgttcatgaagatgaacaaggagtggtggaagatttgccctaggttttatggtctcttctagcagtgaagcctgaaacaacatataccaagttaaaagttgatgtctctttggagacattcgataaaagttgttagactcagtgctagcatatttattatatgttaaatccttcttacgcctttattaaccagcagaataaataatagtaattttatcattagtaatacaatcaaatagaagggtatatgcaatgataaatatccaaaggaaacacatataacaaattcactattcataaatttcatgaggcaacatacaaaaattccaatgtataagagatcattcaacaagtgcgatgtttaactcgaaattgaggatgaaacttgcataaaagtggacaaagtaaaggattgtgactgggtcatagtatggatacaaccaaattattcaaaatagaaaagaatgtattgataactatatgcctgaaccacctagtaaacaatcatatactccatattgtacagtagaaaaaaaattgaaaacatgtcatatttttctaccaaatagtttagctgtaatagtagtgggaataacaatacaattttcagtagttagtgttgtatggtttgcaaaaaataaattagcaacaataacagaagatatgtgaaatatatccaagttcctctgtaagcttagttccagctactttcaatatatgaaatacaagaatgaaaacatttaagcgtatgattgagtacagacagctttggattcaaaccttctctgcagcttcagcaatcttcacatcaggctcttccgtttcctcctcatcgtcatcaaataatcttctcatttgcccttcatagtaccttcaaggaaaaaaaggtagctgtcaaataaatagaaacagctatagctgtattaggtatttcattcagtccttttcagacaatgtgactcataaacgagaacctatgaatatatttcaaagaaatacttatgtacaaaagttgacatgggtgaaaaagtgtaacatgattggaaaacgtaaacgtttaatacagaaaatcaggagggtggatatcaccacaatggttaagactgtaagggctgtgtttgttttagagtaaaaaataaagcaccagtgatcgatatatatcaggtgcaaagtaaagcagtgtaaagaagagtacaatttagaatcagaagcaaagcgccagtaatcattatatatgacttatgacataaggatgcaaactgaagcagtgtaaagaagagtaccgagatagaaggccaatggcagctgagccatacccaagctacacaaggcaaaaaacatagaatgatatacaaaatgatgtcaacttacataaaccaaatcacataaatgtaaaaagaatgtaccctcaaggcgctaggatggacagcaattcgcactatacgagctcctgagagacttggaaatacattgtcttggaactgttcacaaaatttccatggtatttgatcaccggaaggtgaacggccctcactcaggcttttcatagctgactttcgagagatttgtccttccaaacaaacctgaaatacaaattaaaatattacatatataatgtttctgcattacatggcgcatatagtatgaaatacgcttaaaacgaatctaatatcaataaactgaacagtgtagatcatggtggaatatgaaacttgttagtggctttggtgtttgattagaatatcttggattgaagccaacaactaagaatgctagttctcatggtgacacaaaaagaaattaaagtcaattaggtcaatgacatataactatagtaaaaaaaattgctgcacttggtgtctatgttaggagaaatattatgcatatatgtggcaatggttcatgtgacccggggtgctgtacagttgaagaaccccagggcttcttcattggcagtgaaagtgagccttgagctgatgtagaagtgaaccaaaaaggtgagagaagaaccaaatcttgtttatgagtcggtgcaagtgctttgaatattttggctgccgaggcttcttcataggtctacttgaagacatagttgcactattttcttaatcttgttgtgggtactacttgtggagtgattgaccaagaataactttttctaccatgcatgtgcacagtgtcaatgaatcaatgcagagctaatgctctaagacaacaatgagaaaaatcaggagcaaatttcaaaataacatcaaaggaattaattctataaaatgatcagaacctggattacacacaggatatcagggagctggtttttggactcatcaacagggcctatcaaacaaagaaacacaagtaggtagggcacaataacagtatcatatcgaacatatattattgcaagaggatcagtccacataccaagcaatacaaacaaatgatgtgctggtgcatctgccattaattgcatgtcattaggcgaatttttatagtgggaagcaacataaagtgccatcatccgctgaaaaatattaatgagaccactgtccatttaggaagatgaaatacattctccttc

SEQ ID NO: 395 - DNA, 2928 bp, Zea mays
  source 1..2928: mol_type = unassigned DNA
tggtcttgagagtatcgctcgatggatttagagagggttatggatgtaggagtgatttggtcatatggattttataagaatttgagagtgttgtttgatggatttaggaaatgttatgggtgtaggagtgatttgacaggatgggttttattataaagttaaagctggtgggttatacaaggagtatagtcgtatagacttggtgagactctgtctcctgcttgcttttctgtttgagttctgatgggcctcggcctcttttaatattcagagacctggtttgaagcaagatactactgattttgcctggtgggccggacgggcggtggacggtctccatttgccaagctgcttgtacagttgtactcgcagaacttgcttcatgaccatgagcacaagctagcaacatgcaacattgcagttgcagatatatagtacatatttttttttggaaagggcggttgcaggttgtagctactgagataaaggatttttttataatgaccgctattagcaaaaacagttgaccgaacgaagtggtcgacgtccccttccggtcgacaacatttctgaagcatgcatgaatctgcttgttaaattattgggtgcgaccaagtagctcgtgtgtacatgcgcgtttacgggtatatgtaaggtgcatgcgtttctttgtccttttgacacagtccttagttctgcgccgaaacttttacgctatcatcactgtcatggtctctataagaagtcataaaaatagataaagctactatacaatcaagttttccgtatagtatagtcacgccgtatataattaaactatcagaaattataaaaaagaactcaaaaaacccatagatatgcagtattattcactctatttttctttaatatatgttttgatttacgatgaattagaatctaaaaaagacatggttattttacgaagcatgattggatccggacccccatgcattcacattcacttacgcgccgatgtggcatcatccgatcatcggtggcggcggcgatcaggtctggagctcggagtcggacgcggtcctggtcgtcccaactccaactccatgcagcgcttacgtgaaaggcgaagccgacaagaaagagacgagagctcgaatcaccgggctccacctccatgacacgtgagcagctgaaccggtccggtcccgcccggtcccggccccagcagcttcgccacccacccaccacgacaccacacctcagtcctcctcacacaaaaacgccaaacattttaaagcccccgcctccttccccgcggaaccaattcatcccccctcttctgtccagtccattcccccattctcttctcttcacgattccgcgggcgcggaagcccgaagcggcggagagatgtgggtgttctacatgatatcgctgccgctgacggtggggatggtggcggcgacgctgcgctacttcgcgggccccgccgtgccggcccacgtcctcgccgtcgtcggctacgcatggctctcctccctctccttcgttgtcctcgtccctactgacatctggacggtgcgcctccctcccgccgtgctgctagagtgcagagtgtgctaatgctgtgcctgtgcgtcgccgcgacctctccgccgctccgcttagtgcgcgcgctatcactattcactaattaacagagatcatttgcgcgtacagccgggttaccagtaaactgtgctggttgcgttgcgcggtcgtgcgactgcgggagatgggagccgttttggttaggacactggtaatgtagcgtcagaatcggagtttggatgaaccatatccatttctgaacctgttgctagtttactaagaaatgatttaaactggattaacttatgaataatggtggttcgatagcgtacccagtagtctggtaggtaatagtctcgatgccaaggtactgaaggtaggaattcgtggaaactgtcacaatcaagaaagtgattggggttagatggcgatctgaaatcgtcaaattggcattgggctggttctatgactcgtcaacggagtttgttgttgaaatttaagcacaccatcaacatcgataaagcaagtaggttttttatcgtcgctgtttggaaatggtctttagtaatataataataataattgcagatgaaaagaccatcaagatcaaggtgttgttacttgttacgctatgagcgcgatgtgcgctgggtctgcggcgtagtctgctttcattccgttggcctgacccgttatgccatttttctgactcgcaggcaatttctggcaacggcaatcagaagagtgacgtcgggttcttttggagctggtcgtattggagcacgtttatcctagcatggtatgccagtgaccgaccacaaaggctcgtgttctgttaatcgtccttctggttgcagatttgcagcgctgcaagatttcgaacggcattagtgatgttctctgtgtttctaataatgagctcaaaacatgacatgtcctttgcataatgttaatgcagtgtgaaacttctgcataagcattgaacttttaactgaccagttggtcagcgttcttttcttgagaaaaaattggtcaacgtctactgaatatttttttctctcaactagataaattggatcctttgagatggtcgcttgtcctgcattctacaagtagtactatctatgaacaatatgatcaaatcctgacatccagatcggcattgctgttttcattatcaggataccatatttatgatgagctctcactgacataagagcagttcttactggccttcctagttgctttcttcttatgaattgcttactttttttcagttctctaggttcacagttattaggtcgtttattaacatgtgcatttttgcagtactgtcatttgaaaagtggacaagttgtc

SEQ ID NO: 396 - DNA, 601 bp, Zea mays
  source 1..601: mol_type = unassigned DNA
cgccatgagcgattccacatggaaaatctcctcatcactcctcgaagcatctgagcttagagcctataaccatcaccgcttccaaattgttaagagcaaagttgatatccgtgaacgcgagggcatgtcctatgacattgattgttgcctccacaaataaacagaaacaattgatatgaattttatcctcgaatcattagatggagcctcaaagggtgccaaatgttctagttgataagtacgaacatattgtcagcaacccaagtgtaggagtgctgaagaatttcacagggaggaagaagaatgtggtggctgggaagaacagcgagaagagagttcagagtagtgtattgtctttcttcctgcccacgcctctgcctaccccttttccttaagtaatccctttacagagcatagaagagcaagtccaagcaaatgaccgcctaggcccaactaattgacccagttactacccattacacgggagtttgatttgcgcacacgtcggcccatctcctcctgtgctcactgtgtactgttggtgaagccggcacatgcctggggctgacacatattgtccttatacttcattaaggatgtg

SEQ ID NO: 397 - DNA, 2195 bp, Zea mays
  source 1..2195: mol_type = unassigned DNA
gctatctcctttcatccctccttgtacatctaactaaacacaccacaagttgatctttccaccgccaccctaacataaatgttttgtgtagtgtatgttacaattatcttgatttccttgttttgtcgactccttggtgatcgatgtgcctaactggctaaagaatgatatagtttgtaaagatttacaagagcaacacgttaggttgtttccagaaagaatatcatttactatatacactatgcataggctatcaacctcgaagggacgcgcagctcgcatgtaattccggcgattgcacgtctttacaaaataagataattatatcatggtctcaaatttgtcgagcttcttcactctttgcatagatctgaccagcaatgccaaaaatattcctgcacattttcagtttggatcagaccaatcaggaatatatgtacatatagcttgaatatatagattgattctactacatggtatatatgtacatatcaacaagtttcgccagcctttgtgatactcctatatggttaaaagaaataagaggaccaacaagatgcaagaaacactgaaaagatgtgaggtgataatgttgttgagtacaaaattttaaaattcattttatgaaattatgcaagaaaggaaatcctacctgcaccaatgaaagagccgtttgcaattatctggttcccttgactattcagtgtgaccccaacattcaagagagtaccacccaaggctgtatacatggtggccatctgaagaacagtagctttacgtgcagcacgttctgactgcaaatgccattcagttcagattcaggccaaagaaaaaaaatagcgtagtagtttttaggcagaccagatgaggccaaacaaagattactagtttttagtagatttgagggcgatgaaaaaaaatcttgcaatgtatctcccgcagtcttgagaagatgcaagtcaatggcctacctccagtactctgaccctaagtttcagatctcctgtctcaagttgtcctacaaaatcttcaattctctgtattctgtacggcattgatattgtagaatcacgagcctgttgtatgttggacataacagtggtaatgttttagtgctgagcaatataccatacacatgacgaaatgtaaaaaaaaaacaaatgtgaaccagcagatttatatgcttacatcatttgcttgcttccttatttcctggaccaattgaggtccagtttgtcgtctctgtttcaagtctaacagttcctgaagttcaaacgaaattaggctcgcaaacacagacaaacatccaaatgggcttctgtttctaggaagcaaaacggagtaagaactaaattataatgagataataaaagaagcccaggaacatcaaggaatataaaacagatggtttagcatgtgaatcattttttagctgtactgacccttcttagaagatataagataacaagactaaatagaacacatgaatggaaaaggtactgtaagaaaacttgattattatccggaggcttacttgagcatatggtgctgcaactttgacaaacgaaaattctggatctaatatgtatccaattcctgccaaataaaatagtcattaatatacaagtggttaccttattatttcggttgcagttgataatagtagagaataaataaataattggaatataaaattgtgaagaattgggctacagcagactaacaagatgcatgacttatttagatatgcatctgatttcctggaacttagattaacaatagatagtatggtatattcagatacaggcagtaaaacaataaagcgtaaagacaaataaaaaattatcttgaagaagtggtagagcattccacgttattaataagagagcgtcaactacaaaaccagcccagaagtaccgaacaaagacagaagcacatatgccccaaaaaaagcaaaaatagaaaataaaggaaacatggaaagaacatgttactgtttcctcagctattacatgagatttagtagaaagactaatatttgtgttcacatgttgctcagaagattctatgtcataattgttagagtatatttggaagtttacatattgtgtttcgtagactgtcatgtgttagaatatatttggtagttcacatattgtcaggaacatagcctaggcgtctaataccatgagaga

SEQ ID NO: 398 - DNA, 631 bp, Zea mays; identical to SEQ ID NO: 374
  source 1..631: mol_type = unassigned DNA

SEQ ID NO: 399 - DNA, 2477 bp, Zea mays
  source 1..2477: mol_type = unassigned DNA
taaactaaataacaggctacaaagatccttttacggccaacaattaactctattattaaatttgctcttaaatgaagtctatattgcaaattactactcgggttaggtactagagagtggcatgcatgcatccgattgatgggtgacgataggcacgtaagtatttctcgtacgtacgccgctgcgtcagtacgtgtgtagaatgtagataggtatatagtagtgcgtgtatttctcctgcggagtgtgcatgaatatctggtttgcctacagtacagcaaatacagtcagaaagctctaccaagctggctagcaatgcaagatccatcggctgaacctgaccggcagccggctactttcaaatgggagcgcgtctgccgccgggcctccatgccggtcaccaagagtgaacagacaacgagcatgacatggttggagagccacgaacaacgcgcaagtacagatgttcaccctacccatatgcacccatcatatccatgcatgcatgcacggttctcaatcacaggagtcagtcagtacgtcaggagatcctcaaaacataatcaaatgcacaacatcgtctattatatatattggtcatggacttaacaacactgtaagcacgcatgccatcgagcaaccttgacggccccctagttgcatcaagtacaaaattggtagccaccggctaatataccctctcgggggtacccacgatcgaggagagcctgtgtctacctggtcttgcaacaggggctggttgctaccggcagcagctagctttgcgttcctttgcttcccccagccagcttcctccctctcaagtctcgtcaaaacactgcaggggagatgcatggccctagctggaaaaaggccatccatccctctcagggcaaccaaccaaccaaccactaaccagcaccgccaacctctctgtctctctctcactctcactctctacataggattacacttaagcaatgttgctaacaacactgctaactaagggtggtagtaataaacgacataattaacaggcaggacacacacacatatatatatatatagcggcaaggcgacgtgacggcggtggagtccgtccgacatctgtgcatgcaggtccgttacgcgagcggcgccctatggggcgcgcccttccgcctgttgccgagcgagaggacgatctgagggaagaaccctcctccgcccccgccgctcttcttcttcctcgtcgggacgtcgacgtcgcgccgcgcgtggttcctggccgagccgccgttgctggatcctccgctggcgctggcgctgcccccgtgctcgacggggtcttcgaggatggagctgggcgtggcctgcccgtactgcccggggtcgtcgtcgaagcggaggttctcgaagcgcgggaagccgcagcccaggtccggcggcccgcccggcacgtacaggaggatgttggacaggtccccgccctgcatcatcacatggtccacctgcatgcgtgcgtgcgtgcagcccacagctgggtttagcgtacagtaaccacggaaacggggccgtatctaatctaagcgtgcatgggcgtgcgtgtgcatgcaaacgtactactgcgagtgaagcgacgtacggctgattaataacttactaacgtacgtgccaggcgactgattatggcacgcacgcacgcacgcttgaataatccgtcaaccgatcacgctgctagcttagcagctgtcgcgtgcatgtgcatatgtagaagatttttggtggcacgcgtgtagtcttgtatgggtggtggtggtggtatacagtagtagtagcagcagcagaatagcactgtgtaccttgcaggagaggcagcagaagtggaagggctcctggaggatcctgtcacaggccaagcagacgttgccagagcccttgaagggcctggactgcggccgcggcttgaggaagatcaccttggcactgttgatcgtgtagggctgcatgcgtgcatgagaacgacgatgggtcaggatttttaataattcaaaacgattcggagcacgccgcggcgccgtccgtccgtccggtcaccaccgctgcatgctactatccccctttagctagccgccgccggcagcagaaacagtagctggtacgtgacggtccgcgcatcacctggacgaaggagcagtcgatgagcctctcgaggtcgtcaaggcgcaccacgtcattgtacacgtacctccgcacctggcccaacaagtcgagcacacagtcacacacagacaacactacgatcattagtaacatcgttatacaataaatactacggtacagcccgtcacagtacatatacgctgcgtaaaatgatgggtaaatcgaatttacccgttcttcctgcgtgcatgtgaacgtgctgtgctgtgcgctgcgcaacttataacgtgagcaacgcggtgcgtgcgcggtaataattccagcgggaagggata

SEQ ID NO: 400 - DNA, 1789 bp, Zea mays
  source 1..1789: mol_type = unassigned DNA
tagcccacgttaaaaaagctaaaatagcaaatttttcgacgacgatgggctcctcgagcccatggccacgactagcattgctactcgtgacagtcgcatatatgaggaagagactaccaaaatctagactctaggctaactttaacaaggtgacgacgttcgacggtaaatgtaaaaaggtaaggatctttgatatcagcaaaccatgcaagagtactgtcggagagaaaaaaatattaaattctctgagaaataagtgaaaagtaaatttgttgcagggaaagatacaatgtttgatgggctacagtaaaaatatgttgaacaatagaaaatacagtggcagtatgtctaaactacggaaaaagagtacatagttataaatgtttttttcatgaaactaaatactactttgtagtatagttataaatgtttttttcatgaaactaaatactactttgtagttgaagtacagaagagagaaaccatacctctataagttggtagccaaataattgtagccccgcagaaattgttgctattaaaacaatttttagaaatgtataagtgactttatgtagcagcacccatatcgagtagtagcaacagctcgaatgaaaataaactatatgtcagatgtatagaggacccatggtggactgccatctcgaaaccatacaaaaaattcttatgatgccaacagagaacaaatattgatagcaagagaaacgatggaagtcaatttaagataactataaacctttctccatgatcataaattgaatgttgtttaaaaatgatatttgagatctttgggaactcatctccatgttcctgtttatgctatctctgaatgaaatgttcttactcctaatgaaacaacgttctagaactaaaatggccaaaagaggtgtcgaagatcataagtgtataattatcagtataaacctatctccatgatcataaattgaatgttgtaaaaaaatgatacttaagatatttgggaactgatctccatggtcatgtttatgctatctctaaatgaattgttattactcctaacgaaaacaacattctagaattggaacggccaaaagagttgtcgaataccataagcctataattatcatgaacatttatataccaaattgtcactttcaggaagacatttacaatgaaaataatctggtttctgatttggatataacttttttgtattcaagcgtaagagaagaaggcagtacatatgtaagtcatcaactgaaagtgctgttctttacggagaatcattgttataatgaggaaatcagggaaactacatgagtgccaaaaaaacatgacaatactcatattgtttaccaaataaatgagtagactatccatatgatgtaatcatatatggggtccaaaccaaaaggaaatatagaatcatacgcggtttacaacattacaattgtaaaccgaataagtgttgttatttacgaagaatcgttgttgtaaacagaatttaggaaaactacatgtgtgccaaaaagaaagataacagtactcatatcgtttaccaaataagatgactatccataaaataagtagactatccatatgatgtaattatttatgggttgcaaaccaaaagctaatatggaatcatatgcagtttacaacattatgagaacagtgcttcaaaaattaaacaaagactatcggaacccaaaaaaacaaaagaatggtcacctaattcagtaacggaggctgggttgcactaattggattgattgattgtccctaccta

SEQ ID NO: 401 - DNA, 998 bp, Zea mays
  source 1..998: mol_type = unassigned DNA
tcttgcataaatacttttctttaagatagaaaatgatgggataaaacaatcaagagagctcaaagccaacaaagaatctatcaataacaacaatttaatagttagggtgtgaagttgttatcaaatgcaaaaattttaagaattatatttcgacagtaggtaacgataaagtgagacaacataattacttgaacgcaacaaatctggggaagaatgtttgtacttccagacagatatttgacaatcatattcacaatcttaatataatgattgagaatgtctgttaaagatttaaacaatgtgcttacaactgtcgaaaatagaaaacattaaaaatgatgaaatagaaatatttcacttatgtccttctaactgcttggctctgcgaagggatccactattgttttgagagaaacataaaaagtgtattaggcatgagagtaatataatgagtgcaatttgggggaaggtttgagtgtttgaccctaaaccatcttgatttctcgttgctccaccactactttaagaaagggtaccttctccatattttctaaagttgtaacaacagagatatcagcaagaaaaatcatataaaaacaaaaatgagaaacaatgaaaaagataataacataaaccatagattgtctgatttgcttctcatatagtttccttagattagaaggttgaactatattatttgacgtcgtttagtagcttccataattgtctattcatcagacttgagcatgaagattttgagatttatgacatacatcatatctactactgaagaagacaagaagggtactctactgttcagcctctaatttgggcaacaattccttagtataaccactacaatattcaattgtgtcaacctttttatcaataagcataagtaaattagtcctattaatatgctttgtgcccttgtattactttcaaatttcaagtttacatatatgactttaacgcgacaatgcggacaattttctccc

SEQ ID NO: 402 - DNA, 618 bp, Zea mays
  source 1..618: mol_type = unassigned DNA
cgattaaaactcttcttagtcaaaattaaatagaaaataatttaatactcctcgatctccaacccaacacagccattggtagccaggatcaactctaacgcacacatccacgaaacccgcgcacatctcaacgaagagaagcgttttttttattcctgtttaatgcaatgtaataacaagtcttatgtacagttgcaggctacaggcctactcccactgaaaagaatcgccaccgaaccatcacgactctgccaccgccagcgccacagccaccacgttctgcccggcatccagttcttctgacaccgcgttctggtcgatgaagttgaacagcgcgagccccgcggcccacacgtcgttgtccatcaccgactcctccggcgagtggctgatgccgccgcggcaccgcacgaacagcatcccgatctgcgaccacacaatccggagcgtgagcgagctgagcttcactattcagcacactagtcaccgccaacctcacattcgttcgcacgcatgcttcgtcttcttaccttggtgagcctggccatcgccatcgcgtcgtgccctgcgccgctcatcagcacgggcgtctcgccggccgccacggtgcgccccggc

SEQ ID NO: 403 - DNA, 2721 bp, Zea mays
  source 1..2721: mol_type = unassigned DNA
agctgagacgttaactccgggtcgcagtgcgtcgctgccgccgagtgctggtgcaagcgacatcaaggtcagactcagttcggcagcacaaactctacaccggcagatatcatgagccatgacaccaagagtgctgattcggtgctcctcctcaccttatgctcgaccttgcaatcgaccagtctgtcatcgcatttctggagaacaagcctcgagaagctcgtcacgatcgtctccctcacttggtcgtccatcgcgcggatgtccaccgtgaagtttacctgtcgtgggcacagctccaaggttcagctgactgatctgagccaccagttcatcagcagggccaagaagagtagtgcttggcaagcttacctggcccggaatcacgttgctcgcgcttggccacgtgttcagctcgccgacggtgcacaccaggccggccagggactcctcagtgaagcagctgcactcctcgtcgtaggtcagcaaactgttgggctctttacagaggcgttccagagtcacaacgagctctgcagctgcaaccatcggatcacggcgcaatttcattggaactgtgccagcatgcccttgcgaaccatctactattacctaggcaaacaaaaacaaagactaagcgctgtaactactttccttctcactcgaaagcttggtatacaaagggacttggaagcaacccagaattattaatgacagttgtcgtgggcagcttgagtatttaaatgtcaatgttaaactgaacaatcttggtgacagcaatgcctgtcttcctgaacattaattaactaagacttgttcttgcatcaaagatgacacatgacataggtgtgccaattattgaatgagatggatgttgactaataccccaggtgtttctctgattgattgtttatccattacatgcacatacttggttaacttaatattgaccactcataccctttgctaagagaacactcctatctagaattatttgattgcttacctgttgactgctatactgtcaccttatggttatctaatataaccggtacttcttttttctcagacacatatagtaggctctgatattgattgttttataaggaaagaatgaccttacggtaggaagccatgcagctagaccatattttagttttgtaaatgtagttcttgaatagatttcacaagaatagcagagaactccgatgcaccttcaatcgtgtctgtcctgcaattccttttacaacaccaagtggataatgaagggcttccaggacagggccttgctccatgtgtacctacagtttttaaaaatatatatatgtgatgtattctgtattaccaggcaactacatgaaaaaaggcatacgaaggcttcatacctcaacataactccccacagactccgggttgtacctggcttgactaatagcagtagaggtagcctcaaaagaattcattttcagaacatcttgtagtgtagtgccactgatgaaactcaatacaacaaatgaactgcatcagagacagttctgtaaaatagttcggttggttcacgcgaaaaagacaacacctcttatctgatacttgtaaaattgattcaggtagtgtaccagctacagcagcgcttcccagaaaagttgtctggaatctgatgccctcctcatcgctgaatgcaatgacctaagcttcaaaaaggaaaaatgagtgctaggctccgccatgatgatttttccaggtgacgataatgcaatctaactaatgctgattcataatttgataaaaaaaataatcttcaagccactttggattagagcgttgaagccatacagtgaagaataaaccatgatttggttcacaccaaaacatgccgaccttgatctatagatgatatctagacatttgtttactgaaatgcatgacacaacctgacaacttgtgcattttgattatcaggattgccagaataacaaaagatgaaccgtgcacagaatcttttcaagatctgtaggaggtacgtcgaactgattaaaggggcattataaaactagattcctccaggtttctatagtctttcctgattatattatgatagtaataaagaacctactaggtaccttgcagcttagctatccaatcagcatcaaaagtacaatatataattaaaactgagtaaaatataataactctatgcctgctactggcaataaaacaatgtgaaatattccaatcaaacaaataaaagagtagatggacacaaacaagatcaatgcagacaagtgcgggtctacaagacgtatgtggctcataacgccacttgtagagagcgagaatagtataaggccattcacaagttgcggtggagcaaagaaacacatttaacatatgatactatagtaacatctttagtatactggaagcagtagagaattctctaacctccactggtctcgttaacctctggagtttccccgtaactttcaaaaccttcagtgctgagattgctgaaataatacccaaggctccatcgtacatcccagcatcaacgacagtgtcctgttttttgaacaaggaaaatcgtatcagttgtcgcaatattggatcgccatcaaaacactgaaataaccggatagaggaagatagactcaccatatgagatccaatcaacaaggcatctctggtagaatttgccggctcatatcgaccatgaatattccc

SEQ ID NO: 404 - DNA, 2851 bp, Zea mays
  source 1..2851: mol_type = unassigned DNA
cttatagagggggtagagataagatgtgaaccttaatgaatctaattgtttattttctttacgaaatttatcttgttttgtattttaccatagcattagcacggacacactactagtgtgagaaacagtgtagaacatacaaaacttaaattttatggtctgtatcactgtatgcataaatcccagatggaaacattgcattttactgatgcaatttcatgtgctacataaacactataacactcagatggggagatgacatttttttaattattcaatttactgatttatgcatgaaatcccagctggaaaataattcaagtcgatctttatggcagaaacaccacaaatggtatatgtaaccatgtcataccagccggttgatctagaaacctgtaccagtactagtatagctatatggattatatgaaaattccaattgccaaactattgctttatagtagatctttgtacaaaaactagctaattctgttcaacatgtctatcaaattgacaattaatctcatctttacgtttggaggatgtagcatcaaggtatttattatcaacattaaataaagctgtttcaaaagtttccaattattatcatactcaacactgtggccctttgctttcctgtttctagtaggatattaagtttctgccaggtcaattgaaggcaacaaaatgttaaaatggtccgcaaagatatgaaagtgcagcatacatactcttttgagaacgctgaccctatcatgcaaactgtccagagcttgatcattctcatgctcatgaatttcacgagaagaataagctggagctctcaccccaccttcttcaatgccatcaaataaagcagctctatggctacggaagtccctgcaaataataaaaatggataaatgacatcattaccattttgctaacaaccaaagcagtgcaattatctactggttgtctgtacttccaatgactgcagaaggaatataggacaaagtagccatttttcatggcatccgcctattcttttctcagttctgtataaaatagggcactttgtagatgtctagtctcatatcttatgtatcttgtcaaatttaacatagatggcaagtaaccacaccttttgcttagatcattaatggagaaaaggtaactttatacaaagtcattatcacaaagccgatatgaaattgacaggaaagagtggtaaattggaaaattaaggatgaggtacaatctaatgaggaaactggaaggctgtatgcaagcacttgctagttgctgctctgttaattttcttgaattacgattagactgcaattcaccaattacacagaacgaatgcagagcaattgcagtaggtaagttaaactaccagtagaccaagacctggcacagtgacagtcttaattagtaagcctgtgcaattagatagtatcgccattggcttgcaaaatgactagtgttgggaaatcatgacaaactaatgaaaacaacatttacaaacattgccacaactgaatgtaacaatgtatttgcatgtaaaacaaaagaacaggaatagacaagcttaacttagtaaggggatgaaacagaagattattatatcctacacaactgcgatctaggaccagaaaacaaaaatacagcatttagctttgaattagttcaatgaaaatgacatacgactaaaacttgtctggctgccctggagaagggatcatacatgatggtcaatatttttcgtggatgtgcatatttcataagtggctcaggcagcacagaattcaaaagtaatcaatacatgcaaggaaccgaagaatcaaaatcaatacatgatggcggtcgattaatggaaccgaagaaacaacccaggcctagggtaaaactaaaatgaggactatccatcagaattcaaaactgccaaaaaaaaaactcctcatggtcatggtttgacagaactgactgctaaagtggggcttcaagaggggtaaatggcattgaattcgtaattccgggaaaccaaccactggtaccgggaaattagctgaggcgtcacaagaacaatgggatttacttcaccaggcacaaagggacaagcgggggcgcagcagatagtactcagcaggtcaggtattggaagctgggtaacaggatccaccgtatggtgcaacgaacggtataaactacacagatttgcatggggaaaattgttcggcaccaatacggcaataccacattacttcgcgtaaaaaaacgccacattcctaaacacgcaagctcacgttatgacatgaacctgtaaaaaaaaggcggaatagttcgttctacccactaataacagtcgagatagatagatatgtcctggggattgctcgctagggttgagctattaaggatcctgaccttctcgagttcatcggacgcgaccttcactggccgaagagttctcacgggtgcggagaagccgacggagcctgcctgccggtgtgggtgggcggcgagatctgatgaaagcttgatgcgcctcctccgtccttctggagcaagaccacgcaaatggggttggagtcagtgggcccaaatcgtaaccgatattgggcgggcgggcggacctgcgacacctgccttccggttttcgggttgggtggcaaccgtggcatgcacactactgctacagatgggcccatcgcctgtcggttacggcccatttcaatcaattggagaagatcagaagaagttccatttctgcgcggcgaatcgcccgccttggcttccggcgatggacgccgccgggtggcgggtagggggagccctctcgcgtccaagcaacgcagtctccagcccc

SEQ ID NO: 405 - DNA, 536 bp, Zea mays
  source 1..536: mol_type = unassigned DNA
agaagagctgctggaggtagcttcactcttacggtggcattgctgtccaatgatgctgtgttggtgctagtttgacatcggctacgcccaacacatgctcgacaatatacttcatcagacacgtatatagtatggcacattgacatgtcctgtttggtacaactgctgtttgcagtttgttggaaaagcagctgagaagctcgtgaaaagcagcttgcttattatttgcccttagttcatcagaagtgtttttatttggtataacttctgtttaaatttataaagaagctatgaaataggtgtgccaaacagggtatgaacttcagtgtctgacaactagatgtctatcattgcctgcgtcttattgtggtcgaccctgcttagcatggagaagctgcttatgcgctgttcagcatatgacctgctgtgaaacgagactccctccctcaaaatctgtaacttagttgggtgacttttcaataagaaacaatcaaaacagcttatcctgggtgatatacggcttgctctgatagagt

SEQ ID NO: 406 - DNA, 1564 bp, Zea mays
  source 1..1564: mol_type = unassigned DNA
ctaaatactaaaaataacccacaaaaagaccagactaaataatacattatgggttattgctgtaggtaagactgaacgagaagtgaagttgacatttaatataaacacgaatttcactgatcctattactactagtttacagggttttatagtttacatatgaagagactttcgtcagaaaagaaaaacttgagtctgcttttagttcccctttcttcaggttcacataatgttcttgattttttgagtccatactttattaccaccattgttatctttttgggaaaaacgagagagataagcaatggctaaatatacttgcttacagagttaaacagatgttcagtacaagcactaaaattacaattatacactcaagaaccttttggtctccacataacagactgaaatgcaataccgttacggtctatttcgtttcaatcttctatttatctgcaccaaatgatgtgtttcttattgaacaattccaatttaattcttctgcaggaatcatcatgaagaaactaggatttctaaactacaaaagtgcagtttgaagttttagttatgagtacatcaacacacagcttcttcagtaactcaatgcccatgctagaaaacttgattgacatctgtaaggtattgttaccaaaactattcaaacttgtacaataactatcaaattcctcgttttgtcaagcattgtccagatatgcaaaggctactgattgaagctcatcaatatcatgatacccactcccttgcgtggtccaagaaggattgctgttgttgtagtagtcaggcatgcatatatctggctcataaccttcagaatgttgagttgacgttgatgtgaagcaatcgtttgcaaagtataactgcctctcactctttactgaagaattgtttgccattgttggttggtaaaagagctgcccgtcttgaatataaggtgctaatctttcacagttttctttctgagggtttgatgtcaaggacccatctccacatccttgtattgctagagctttgaaagactctagttctgcttgcagcctgaccacctatgaaatttcacaaatagtacactttgtaaatgttgatttctttgcagtgtgaattattatgattgagagacctttttaaataatctagaatactataaatttatgcattgttaaaaaataacgaagtagcggtctcataataagataggaagatatgtttattatatcatcacacttagtggatagctcttagctgcatttatgaaattatatgatactccaaaactttttcatgttatagttaagtttgttgtaagtgttatttcctatgagtctacagattgactgctcgagtgacatttaccctttctatattgaatgtgaaccaaacacatcatttatgcataactttatttttggaaatgagtgctaatgtagaatcttgttacctgttgttgcagagaaaagatgtgagcaacacagccatatattggatcttgaagcctggcttgcgcctcatatgacatagtgactgcagcctcgcaacggtcacttat

SEQ ID NO: 407 - DNA, 870 bp, Zea mays
  source 1..870: mol_type = unassigned DNA
ttatggatagcagcaaagtgcgcagccccgtgctcatgacagaaatatggagcgaagacacaccccttcacacacttcctgcgtaggaacttgcacgcaccacatggtgagccaaggcctgtcatcttgggtcttcttcttggtgctgttgttagtcttatactcttattcttactctttgatgtgaatgctatgaatcatggggtcatcattctctgctatttatagagactagcttatgctgtgagtaactcagtatattgaataattaatttatcttggtctccctagtggactacaagttcaattattttaatcatggttgttccactctgaattctgcttcagattccttccagagtggttaaatgacaaacgatgtaacactccaaattacttataattttcttgttgattgtttattagttgataaactttacattcatctcccggactagggactatgcaggagtggtagttgccatttcatcaagaggatggaaaaaataagagagaggctgagacatctccctgaacacccattttctgataaactttactcatatccaagttatgtcttaatcttacttccttctgctagttcagtaaggacagaaatatcaaaatctgctgaacattttttttcatatgttgttgtcatctctaagtacatgcttagaagcttggcattttgtccccgagatgcatcacttatgattagattagaattagataatcacttcgcataaagtttgtgtaccacctatatggctaaacgggtggacctctcatgatatttattctaccctactaggctgcctagaccatcacaattcacaaatattagctttactcaatgtcgctattttt

SEQ ID NO: 408 - DNA, 550 bp, Zea mays
  source 1..550: mol_type = unassigned DNA
cgggtagtacaacttaaatatgtgccgttttttcctagcaagtacaccttatcttgcagcattgtgataccactattttttaaaatgaaaacaaatatgaaaggtgtggaccaatgacatggctgcctagcatggtggcgctgtcctcgtcggcagaatatggcaacgtgccggctccttgttgcttgtgtacgctgcctagcttggatgtcccacacgttccacacgctggacacttgttgtagtcgctgtcacgctcttgcctcgctccttcccggctacattacataacggatcggagtgtgatgatccatcgatggagctgtgagctgagctgagcttaccaccaccacacacgggagatagctatagctagcatagccagtcagcgacttagcagcagctagctagccatgctgccgtccttcgtgtcgccgacggcgagcgccgcggcctcggtgacgcctccgccgcggccgataccaggcagctacgggccaccggtgctgggcccgctacgggaccggctcgactacttctggttccagag

SEQ ID NO: 409 - DNA, 1797 bp, Zea mays
  source 1..1797: mol_type = unassigned DNA
accgcccaccttccccttcttcgtgggcgtggacccgcgcgtggtcgccatcgtggacgccgccgccttcaccgcgctcttcgacccggacctcgtggacaagcgcgacatcctcatcgggccctacaacccgggcgccggcttcaccggcgggacgcgcgtcggcgtgtacctcgacacgcaggaggaggagcacgcgcgcgtcaagaccttcgccatggacctcctccaccgctccgcccgcacctggtccgccgacttccgcgcgagcgtcggcgccatgctggacgccgtggacgcggagttcggcaaggacgacggcagcgacaagaagccctccgccagctacctcgtccccctgcagcagtgcatcttccggttcctctgcaaggcgttcgtgggcgccgacccgtccgccgactggctggtggacaacttcggcttcaccatcctggacatctggctggcgctgcagatcctgcccacgcagaagatcggcctcgtccagccgctggaggagctgctcatccactcgttcccgctgccctccttcctcatctggccgggctactacgtgctgtaccgcttcatcgagaagcacggcgccgaggccgtggcctacgccgaggcgcagcacggcatcggcaagaaggacgccatcaacaacatgctgttcgtgctcggcttcaacgccttcggcggcttctccgtgttcctgcccttcctcgtggccaaggtcggcggcgccccggcgctgcgcgagcggctgcgggacgaggtgcggcgcgccatggtgggcaaagacggcgagttcgggttcgccaccgtccgcgaggacatgccgctggtgcggtcgacggtgtacgagatgctgcggatgcagccgcccgtgccgctgcagttcgggcgcgcgcgcagggacttcgtgctgcgctcccacggcggcgccgcgtaccaggtgtccgcgggcgaggtgctgtgcgggtaccagccgctggcgatgcgggaccccgaggtgttcgagcggcccgaggagttcgtgccggaacgcttcctcggcgacgagggcgccaggctgctgcagcacctcttctggtccaacgggccggagacggcgcagcccgggcccgggaacaagcagtgcgccgccaaggaggtggtggtggacacggcgtgcatgctgctggccgagctgttccggcgctacgacgacttcgaggtggagggcacctccttcaccaagctcgtcaagcgccaggcgtcgccgagcgtggcgcaggcagcagcagccgccggagcgcagcagtgagtgcgctgtataggatccatcggtggcgtgcgacgtcgccggcgccggcgccggccaagcaataaagtaatgagtaggccctcctcgtcatccacatgctcgtctgtgttcgacttcgatcggtgtctcttcctcccggccggccgctggccgccaaacagccgttgtggtaataaaaaaatcatttgtggaattgcagagtgtaccgtggtcacacacacttgtacagtgaattctttagtgacgctgcaataaaattgaatgaacatgtactcgctcctcgattgtcttgttgcttaattacctccgatcaaactaagaaaaactctgaacccttgacttaatttttcatggcttgtttcatttcttgttacgctaaggatagatcatgaagaaccaacaaaacccaatatttacagataaatcatagaaaccaccaaaatgacaggaagtcacacccaacgttcccgtctcagataaactgaatt

SEQ ID NO: 410 - DNA, 2808 bp, Zea mays
  source 1..2808: mol_type = unassigned DNA
catagtgactagatggaaattataagttgtagttagttttgtaaaaaaaatagtttgcataatttatcctgtcttatacgtccaaatgtcataacattaaaataactgcttacaggctgataattgtcaaaatgcacgaatctactaattaaaagtttttttattttcggtggtagtttcatttctaacatgtcagcaatttggatggtgtggcaatcaatcagtgaagaaagagatgaaaccatgtgtacactattacctgggcatattatgtcttgcatgttacctaaaataatgcaccaaatgaaaatctccgctatgagagaatgtttcaaccaagatttcatttcttttaatttgtttggactttgtaacttttgaacattagttttagttttttttttaaaaaaaactcctcgattacgttaaaaaaaatcctcgaagccaaaaggtcacttcggagcattagtttttagtttttttagacttagtgtgcttttagaattttgtcttataatagctctttagcttttaaaagatcaaacaaacggcgatagaataggagatcacacaacagcgcatatttagatttttataggataggatacaagaacacaagttacttacataaacaaattggaaaaggaatcttcgacccggttgcattgaacggtaatgcaggtcgtaccatgtgcgcgaagcctgaattattggcttaattttagtccacaacgactcaaagcatcacgccagccgcacctgcggaccgcggcgctgtcctgtgtcttctcctcccagtagcgtcgccatgatttacgcaagcttgcagaacgggaggccatggcagcgcgcacgggtatgatggcccgacgtcccggttcctcacgtgctcattttccacctccatggtctccaggtcgacggagaagagccaggttttctcccccggcgtcagcaccacggaggtattgtctgcagcgacaatactcgccggcagcctaaagaaccagtattcccaaccgggcagattcgcggtcgcgtccctcagactgatgctcctctctatcacccactcgccggaatccggtagctgacagaacacctcgaggtcatcgccgtccaagcgcacgacgcgcaccgtgtctccaccgtccacgccaccaatgacacggaagctgatcctccgattcggcagctgcataggcgccgggaaggcgaggagcgagaacttgagcgtgctctcgtcgagcacgagcaggctactggtctccatcccccagtagaccttcctggcggctcgtccagcaaaatggctcctctctatatctgggacttcaacgtcgtcgtcgttcatggcgtgccaacatatgcgccacccgccgtcgctacctggagtaaacacgcacgcccgtggcgtgcagaactggtagcgccacctgctgcgctcgtagagcacggatagcaccctgaagtttgacatggcgtcgccggcgcaggttccgacaccatctagcaggaaggcgccaagtaacgggagatggctgaggtcggccgggcgcgcgatcccctgatatcgccgtgacacgggctcgcacacgatgaagtcaggtgaccagcgccttgggtctatggactcccaccacggcgtgctggtcaggaggaggaggctgccgcggctgtcgacgatctccctgctctggctacgccgtatacggctggaacggttgtcgtacatgtacatgcggcgtgggcggtcgccttccaccggcggagcgtataggaagtcgagggagaagtggcccgcgtcgacgacggccggcgacgagggcacgaaggctgccggccgtttccttgccggccggccccaccgccccgtcgcgtttggaggcagcatgtccgtgacgtagtagcggccggccacgggcggcgcgccgtggagggcgcgacagcaagccaggaagcctgcgccggcaacggcccggcgccagcgcctgcacgtggccgcagcgcggatgaggtggagcggcgagccgaggttgaggagcaccgcttcgaggagctcgtcggggaggtcgtttacgctcgtcggccccgcgggcagcttgctcctctgtttggccttgaccttgttacgcttacgccgctggcccttccccattgacacaggaacgtgcgcactctggttggcactcgagaagatatgctaaactagctagatcggtcctgttccattgagaacgaacagtgtacctctatttatatatacttgctcggttgatccactcttctattgtggatcatttttgtatccaagctatttttttaactctctaggtcacaaatttgtcactctcttgactaaaatctcgtgtcaagctttccaaactttaacaagtttagagattcaaaaatgacatcgctagacttgtcttgaaaagaacttctatatttacatatatttattagacaatgtagctataacttaatggcaaaattatggccaagttgcatctcaaagacaaaacaaagccaaaaaaatgttataagtttttcatcgagattgagtacacatggtatggtacctaactaattgagaatcaaagttgctatttgaactaactatgaaagaaataacatttttgtgatcgaattagattagcattatgatgtatttggcacgaactaactatgaaagtcattcaagttttctatatttggctagcgaggaacccgaaatagaagatgtctatatttgaatagtcattttcataagcagttagagggtacgtacttttgtataaaaatctc

SEQ ID NO: 411 - DNA, 1495 bp, Zea mays
  source 1..1495: mol_type = unassigned DNA
ggtcttgtcacgcagtacagacccaattgcttttgctgccaatggagaccccacacatctctcaacgattcgatcaaccaactcaactaaatcatctggcttgctcctctgcaatccgaatgctcttgtttctataatttcttgtatgtattccttgcccaagattgccacttcatggtaatgatttgtccatgagctgtcaactacagcacccataaactcggctacttgtttttcacgtgttgtcactaatacggcgccatagacatcttgtgtaagaaacgccttgatctttctccacttgtcaaagttaatatccttttcccagacgtcatccaatacaagaaggtacctgataatgttttttcattagtacatttctatctggatggccctaaagcaagcatatagcctatacattacaaattgctccctccaatccaatttaagtcacactagctttgtattaagtcgatcatatttctctagcttcaatgacttttatgaaaatatatattaacatatacaaaatacctaacagatttactcaactgacatattgcaaggtgtgtggcactcaactcaaagagagctagtggtcatttgcatatataatagtgtttgttgcctggttaccagaaatgtttgactgcatcagcttttgtgtttatgctatatatgtagtctatagcagaatataatacgatctttttctgtgggcagatcatggcatggtctgagaggagatgaaagtagttatgcagactacagaccacttcagcagaattaagttagagctaatgttatgtttggaagggagttgacctgtatacttctctgtcaacataattcaagcttccattttggaaccatgttgtacttttacgtgattccgtacttgtagaacacagtaggaaatatatcttacatgtgaatgccaaaagcatgagtgcggtaattaaagccacatttagttatgttctaatttaattttagagctcgcacataaacttgtagtaaatatcagcaaagaagtccattaggtacacacaatatgacacgatgtaatgagtgtttagtaaataatgaaataaaaacatcatacaaggcaaagaaagtaaagttactaataactaataagctccagccaatacctctttccgttaagatgttcttgaagcttcttcactgcttcctcgaggtctctctctgaggcattacatatcttgttggcaagattaaggacactaaaatcatctgacacacatacccattttcgtagatggaagtactccttgacctgagggtcgttgtggatgagctgagcgagggtggtcttgcctagtcctcccattccaacaatgggaacgaccataagatcaccaccgacaacacgaccattggcattgaccaatatgttaaccattttgttcctctcatcatgtctagacctggcaacaatatcttcatgatcatcaatgaggaaatccatctc

SEQ ID NO: 412 - DNA, 1209 bp, Zea mays
  source 1..1209: mol_type = unassigned DNA
ggtccttgaaggtgtcaacaatcctgcgaagcctatagcccatcctactacggaatgcaacacgattgtgcgtaagagttttaccctgtccataacgccaagctcggtgatgtgcccattctccttggcccggcggcggagcacctcgtactcgaagtcatcaaagacctcgtgtgccttgtacgctgccgtcttgacctgctcgagccattcctgcacaccgcggcgaggcccctgcttctcagcatcaacgatgaccgcttcgatggcttccaacctgagcttgagggtgtcatagttcttctccatgccctccatcaccttgtactggtcggtgagaaggctgacaaccttcttcttcaacagggaaaccactggggcgaccaccaggctggtcgctagttcagccattggagcaaggactcagcagagctttggagcgttgggtggagtggggctggagtggagaagatagaagagaatgtaaatcgctttggaggaaagcacagcagggcatctttggtttgctttactcaaagaaaagaaaaggcagtgcatctgtttcttaatatcttatcgctggtggaataaatgtactctctgctatagtggcaaaagaataaactgcagttgcagcacaacgaaggcatctaaaagattgaagtatctatatattctttccttcatgaacagaactgtatatgtatagtgctacacagcacagtgaacatgctgcaagtactgtgtgcacactgtgtcaaccacacaagagagagagaaacaaaaacctgactaagcaactaatgcgacgcagtccatgtcaagcaaagtcatacatccaaagttaacgtacttatctgtcttcatttattctctgtcggccattgtgaaggtggttgacaggttgtgtggtcttatatctgtctccacttattatgtctccgtcaggacagcccacctcttcacctgccagccagatgataaactcgatgatgaggaaatgagttgggattgtagaaaaagtaggacctaggtagcacatgaacacaaatttaaggatgtatttgtcattttaaatcttaatactttctttgtttcagaaagaatataattctgggttttacacgggctggactttttaagttatagttaaacttatacaaaatggtatcaatatttatatctctaaataaatgtatgcatatatat

SEQ ID NO: 413 - DNA, 2788 bp, Zea mays
  source 1..2788: mol_type = unassigned DNA
acttgtgtttgttatggatgacatggaagggtgcactaccaagcgggatccgcagaccagtgacctggagagagccctgtgcacgtggcatcagtttgtgggactggcgagcgaggcccacgagcaacaagcgcgagatccgtgtgagagatggtgggcggctgaggcatgggccgtacctggtagtgaatgtgggcgagcatgtgtcttggtgaagctgggtttagtggtaggtgaattgagccgaccagcttccggcccatgctgaggtaagttcttctcttttcttttcctttttattttctgatttcatttcaatttcagttttaaatcccaaatttaaatttgatcttaatctcaagtttccaattatatgcagcacccaaagatccagcatgaaatacataatttaactttatttattttattatctcattttgtccattaatcacatgtttttcaatatgaaacacatatacacaaaatactattctagaaaacaattttcagtatatcatatgaatactttagtgaatatttataaatactaaatcatcttaaataagttaatttgtgtaaggatcatttatttagtctctactaagcgaaggtaacacaaaatctatttaagaacagtttgccaattaaacatttgagggtctttcttatgttatcctatgtttttctcaaattctagtttcaaagtttaattctaccagaattttaatttcactacttatttactttagggaatatactttataaagaaaggaaatctattgttaaaaggtaatttaacttgaatcttttggagaaacttttataaatcccaaaataggattttgggtgttacaaccatgcatatggtgctactgaggaatgatctttagttctggttcctacaacgtgtttaggattgcggatgtctaagccaccatgttttctcttgatgtgcacatggtactatagagaagtgacctttagtactgattgccaaccccctctagtttcgcttttggtaaccaagactctgcaattgagactttagttctggttctcaatcccctttaacatcgattatggtaacccggattatgcaatttgacaaggacatcacttcttttgatgcattacaagatctgcttacaagagtacaagcacgtatggtatgaatataatattagcctcggtggtgctgtaaatcatattctcgtgacttcttagaaatcagaattaagatttcatgatgtagagccacttaggcgattgtcaagttatcatcgtgcctcttcgcaatgttctttggctaggcactggtcaaatgctcgcggtacagtcaggggcaaatgtatcattatgtgtgtttcttattcttatgtgtgcgaatatccttcattggttctatctctctaactacactttgctagtcattagagatgtcagcctcttcttcttcatccttgaggttgatgtcttttctcgaaacaaagatctcctaactatgattatagttgcacgtgacaataagagtgctaggtttagttgtcaagatagatgaggcagtggctctggctttgtatggcaaccaattgatgaaggcaactatgcaagaagaaggagaggtattcccattgagttcgactcttggctaccgtttaatccttccttctattatggaagtaagtgctaggtgttgggtgctttttagtgagaccttttcctcatcatcccttctcaggcacaagagtgaatgcgataagtattgtaatagctttatggtacaatgaagttatattctcaagtccaagaagtagtatgactagacctagaccacaattatctaacggtttagaagccaagtctaaaaacttggtcgtatttgagcatgactcaagcatgttgtgttggttttttattgattcgggttggagttttagttttttttcaaattttttgacaagatcatccaacatgtcctaacaagaagttggaggagctcaaattggcctgatcttaacaaggtgtcaatgcaacatactgaagacgtgcatcgtgcacaccaaggaatgaatgtgaaggttgatcatgcagagaacatgacaaggtccattgagatttcagtcgtcttttgcaaaaagttcctacctggtccaccagctattagtgtgtgacgaccgacaagtccaatatgggattacccatagtagcaattgatgggcttcaacataagttgagattaattgatgatgaatgtgagataacaatttatacatggtcaagacactagggtgtgtaataccctacatcctatgtggcaataatgccttgcattggattatttattatgatatatgaacaagagagtactcatgtctccctttatatagtccacatggtaggcatagtcaagtcctagtcaacaaagacagttctaatcctattacagaaataatctttcctttagtcagactaggttgatagcctcttgctcaccttgttccatatcttcagacaacttcatggatcaacccatcttttttcatgtagtcggtcatatggaaaacccttaatgtagtaatctaaaaatcacggagccaacaatccagcttccaaaacatttttttcccaaaaccttgcttagtgggtagaaatactaagaacgctagatgcactagtgtaaccctatctagatgtgtcagcatgtgcattaaacaacatgagagttgccttttattttattctttgttaacaacatgaggtttagggtttccgttttcgtattttatca

SEQ ID NO: 414 - DNA, 1060 bp, Zea mays
  source 1..1060: mol_type = unassigned DNA
actcttactcgtgacgaactcgcgactgagactcttcagaatttacactgaggatgtcttttagtctttagcaatagtgagaatagccgtgcaaaacactgttttatctcatagatacatgatttatagagtaaagtttaaaatacaaaaatataataaaagatgtgataaaaaagttgtcgccgcccaagcaagtccccataaatttacaagttttttctattctttccttgcaaacccatctgttgtaaccagtggtggatccagaaattgatgtgctactatgctaactaattgtgacattgctggtctaatgatagacagctgataccttatagtatacataccgaaatgtctgtgtcggatgggtcgtctttacgaatgacactaaaagtcattaatatggtattatatgtgtcatccacttaataaagatggtaaaatattatgttgctatgttagataatagtgtggatgataagtggtgggttatcgagtgagacatttttctatataatagagcgcgacgcaaactgtcaaggataggatgtccacgtatgctctatttctaccagtcgtcagattttggatccacggtgagataagagcgcggcgtaaaacggtacggaccacagctagataagcctggattgtcctcttcagtgttgcctttcgtgttctctaccagacactagaatcttccaatgtaagatcaatatgtgtccagcgtccagaaatttcgtcacatcgcttttatttacagcgaaggcatggagccgacgcttatcttccgctcccttccttactcgccctcaacacgcaggccacagtggtgacgcctatgcttaacggcgccaacgactttccctcacacctcttgcacaggcgcaagcgcatagtaggtttctgcatcacccatcatcttcctcgcaacgacgatgctcatcttcgcccgcatcctttctcgcgctcggcacacatgcgacggcaatgacgctcatgcttgacggagctagcgacttcccctcccgcctctcacacaagcgcaggcccgtggtac

SEQ ID NO: 415 - DNA, 591 bp, Zea mays
  source 1..591: mol_type = unassigned DNA
gtttgctgtcgcaataaatgtgaataatttgcttcctgcaactgaaatatggcagcaattcatttggacaacctacaacttctattcagaacaaatagtatggttttgcagtaaacaaatggttacctattcctttccatactcaccacaatacatgtcctcctagacctatagaccataaatctcatgtttattattctgccaattaaggtgtgcttgctctgccaattgaagtatagtatgtttattccatgttcctccgcacacctttatatttttcctatttgtgtttcatgttttactccatcacccatgtttcattgaaataactaactgtgcatacctatttaccacacataaagttgatcacttcttttgtgagaggtcaccattgctgctacaataggcatgaccaccatatttcctccatacatcaccatacttttccctctatgtacatgtagatacacacttcggataagtgttcaagtacacatgattgacgatatgctgttatccataaataaacatatgaacatacatcatatactatgaatgcacatatatacggcaacgactaatatgcaagca

SEQ ID NO: 416 - DNA, 632 bp, Zea mays; identical to SEQ ID NO: 322
  source 1..632: mol_type = unassigned DNA

SEQ ID NO: 417 - DNA, 1247 bp, Zea mays
  source 1..1247: mol_type = unassigned DNA
gtctaataccttagttattcctgtggacgcactcagttattctctggtttcttcccttcgcgtcctctcccgccgccgccgccgttgaccagatgggtcgcgtcatacgcgcccagcgtaaggaagccggctccgttttcaagtctcaggaggactggtcgtctcagcgaacaggctgcctcagccgcagcaaagtccgacaaggccacttagacaacttttgcggttgtttcaattacattagttgatagtcttctttgtgataaaacagttaaagctaaatatcaaaatcatatcaaagaagctgtagatttctgaaattttgattaattttctttttagcaacatctgcaggcactctgtttccaaatatgccgagcatgacaaggagctgcaaacccggtgcagcccacaactgaaaatccaacaagttcttggcctgctctgagaaggttctcccaagtccatcttcaaaagcttcagcagatgaacaatatgtcaaaatgtacgaagtgctgaaaatagtatctgaaaagtttcctctgagacagaaaaataaaggtggtgctagtcaacagaccaatgaagtacctgctggacaacagaccaatgaaggtggtgctggtcaacggaacgatgaagtacctgctagtgttaagagaacctatttcaccgtgactaacattgtaaagttggctcaacattcggataacgaggagatctccatgcacatggacacagatatgctcgtcagacattttttcagtgtggtcttaaataacctgctactgccacaaaagtctatttttatgtaacctcacctgaacttcaagctgtatatgacctagaaaagttgaaaaaggttgactggtcatatgtgatatttcattcattaaagaaagctcttgcactgactttaagaagaatccggggcatatgaatggatgtgtccttatgtttctagtaagtaccaggataatgcagagcatatccataattccttaaagtaattgtttttctcatgttgggtaggaaagtgactaagtgaagaatcgttggttcacaggttgttttcatggactgtattcaaaggaacagcttggacacaatgttgcagaattaacctgtatacggaggcaatggtcgataaccttttgagtgcaaaaccaattaagaaaatcagtaagaggacaaaaagggtacgaaaaggaacctttaagacattttgactgcatctgattgttgca

SEQ ID NO: 418 - DNA, 1232 bp, Zea mays
  source 1..1232: mol_type = unassigned DNA
tgtccctttcagctggctgcggaggaaaaggaaagggcagcagaggcacagaagaaagtgatgttgctggaggatgttgatgtaagtactattctattattgttctatgaggtgatgcggaagtgtagtccaaagaaactgactgcacccccttgatgtcctttttagttgattagctgggaagatagctgcttcagacaatttgcagtgctgcatgagaagtcttcttgtaagaggtaaaactagaataattgttaattttttaacctctattgcaaatttacctaacctctgtttcaacttttttagcatcttgacataaatgatgcagatagcatatacaagaagcatattttagaaagatcccacaacagaattgttttagactttccttcctgtgaagtacgggaatctacttttattaattgtttgcaaccatgtggtcatatgcattcccttgtatttcatttggtatgcgaactatggtcagtggggtggcatgataaaattattcttagtgaaggtgctgtggtaagtacttttacctatgattgtcatctcaaacttagttattgttattctttaactatggttgttgtatctttgattgttattccagaatgatttgttgaataaagacataataactgctaaaagtctgaacagggagcttactccaaataaagtgaggtatgtgaatcaggtttgtgctctttgtatttcaatgttactgggaaagctctgtatttctcaatgctctgtatgtctaattgttttttccccagatttttgttcctatagtttataatcatcattggtcgctagttgttgtttctactgtgcaaagaaagatatatgtccgactcttgtcgaggcatatataaagaggtgccaattacgttgcttgaaaaactgcagacgtttttgcaacgtaatcacatggacatatctggttatgatacagaaacactgatggttcagcagcaaaataacacgtaattgaacgtacaccaccttagtcttgtagcctcctccgtcttgtcatcttgctttataagaaaaaaaattgactgaactactgctaggtttttctttagcgtttaccatgctatctcctattttcaaccttgctgcttcctgtttccaccatctttgatctctctttctgcgaattcttgcagctattactgtggttttcatgtattgttgttgtcatgtacgggcgcaagtat

SEQ ID NO: 419 - DNA, 972 bp, Zea mays
  source 1..972: mol_type = unassigned DNA
actgctggaattagatatcagagtgcttgctcaaaaaaacgaagtcctgcgtgcgtgcatgaaggtagaaggtgatattttggtcgcgttcaatagttggcacaagtcaatgtcttctttgggttatacatagggacatacagaaaaatgatctaaatggtacgtaacagcactgtctaaattaaaggacgtaaccccaagccagcaaatttggaatgaagcaaaatccagcaatgattatgtaccatattgtgtgtgtgtgtgagagagagagtttggctctatgtatgactctctaatgacaagcaaccttcgtgtttttatagaaaacgatatgccatacaagtgcatccaacagaagacaactgttacaattcagttcagaacttcagatataacaaatcactgcacgatcagtagcgaaacatgacagctcaggttaacaccacctaacagcgacacacagaggcaagcatgcaaaatgaaaactgagctcgaacgcggccgcatgcatgcatacagaagatcactggaacacgtttcttcaatgcctgcctcgggatttcgccctgctggcctcctctggggtcgacgggaacagctccacgtacctcgtcccaatggtcatcttatccttgcacatggccgtcttcgcgacttcagctgtcggaaactcaacgaaggcttcacccgtggccttcccatcggagcggtaggcgatatgcacgttctcctctgccagctcgtactccaggaagaacttgatgatgtcctcagtggtggcagagtagggaagcccgcggagcttcagaacctctgtgtactccatgctgcccttatcttcagacggcttcctaggcctcggaggaggcggggagcggcggtactccggctcgaaataaccgccctggttcacctcattggctattgcacagtagtactcgtgcttcttgcacctgaacacctcgacat

SEQ ID NO: 420 - DNA, 1616 bp, Zea mays
  source 1..1616: mol_type = unassigned DNA
gagaaaaaagaaaggagaacaacccccatctctcaatcccaatttcaaataataacctgaatgtaaatataactgcggaggaaagaaataataataggattgacagaaaggatactaaacaagcaaagcgcagtgaaatttgtgccccaataaagttactgttggcaacatataagtaaaggcaattttttatcaatgactggggagttttctctgagcacttaagttcatgtttcagtgcatcagaatatcaatgctgactctgtagctaaaatttcctaggataatatatttgttcgttgggaatgtatcgtgtgttcacatagtctctacgatcatatgaacacttaaaatctggtgtgtctataagcaatccaacggcgatcgataacttttatttaccccctcgtatcttagctttgatgacaattgtccatttatcacctctcaatctctcaccttaacgttggattgctcataaacgcaccagatttaaaatgcaaatatgagcacgaaggtttcatgagcataaaatatgtccccttgttcgttttacatgattacatcagttcaccatacagcggttctaaaggggaacccaacagagatttgtcactggatgaagagcaagacaaagaaaaatgtcaaagctgtgtatgcaatgtgtgacagtagagtagactggatgcaagtattaatcgaggaccacatgctgtgtggtaacagagtagaatgaatggcagtattatgtcatcaattgtctataataatatttttcgatacgaataaaatcctgccaactaatcaaccggtacacaataaatctacccagcacagaatcgtgctggggtgtttcggtgcccggtaatttcccatgagcactcttatcttataggacgaatcgcatagagcggcagatcgttggagcaccacaccaccaggggcggataccgctgtggattcccagtttcccacccaccacgcgaaagacaaacctaacgaacgaagcttcgacgagccggatggactgtttcgggtcccggagaaaaaggttggtactagggttcagggtcagggggaaggaagattctacggcggaattgaagggggaagagagaggtgcaggtgcagccgaagcgtacctgtatctggacggagacgtgttcatctgagtgggtcggcgaccggcgcggtggcggaggcggggggcgagttccccgttgcggtcaggagagagttggcgtcggcctcaggcggctagggttactagggcactcggacgggagaggacgatgaggacccttttgggaaggaaacgggaaggccgcgactcggactcgcgggcttgatgggccttcagccaatcccgaggtgggctgtgcaggcctcgacggcttcttgaaggccgaggatcaggagaagttactgtgcaaacgacagcagtgaacaggcccaacaaaacctattcctcttgttgtatcagtattactcgcggttagacacgctttgtattcctattcacttggttctaaactataactataagtttttttagcttatgtatacataaatatactgtttttactatatatccaaacacatgtgtatcttagtgc

SEQ ID NO: 421 - DNA, 2664 bp, Zea mays
  source 1..2664: mol_type = unassigned DNA
ggatctttgaggattgcagccagtgccaagagattacatttgtttgtgacggtagttggatggattgtagcacagttgtcatggaagctgtaagtaagcaaactggagtcactttaaactagtacacgaaacacgacacggctgaatttaactagcgcattaatctcatcagagcacgacacagctgcagcgtaaggggctcagggccatgcttggttcagagttgcaacatacaaggtaatagtttccaagtacatgcaccaggttaactgcacttccagtaactcaaaaacagataaactacgtactactctagctaggatcttcattcattaagcatggaacaatggcgttgaagtcagcggcttcgcttgcccttcgtcttgcttgctttccaaagcgccaaagcatgccgaactgcttccaccgtctttgctttccgatccaagtggtagttccacagctcagggaaaggatccctcctgccgccattgccgtccttcagctccgtcagcgcctttgttactgcagcatagggttcctcaccgagctcctttacttcttggagcttcttgtcaccctcattgagtgcttcctacacaggcacgtgcagcacaatgctccattataaacaattcgtaccaatagatacctgttcaacaaaaggcaaagattccatcttaccgacacttttccatcaacaataataaccttgaaaggatgccattcaggattttcaatgtcattctgccactttgaacaaagtctagcactttcaacttctgcatccactgctggaaacttccgcttgcacaggtttagaaacacactgaggtcaagttcaccaactttcttgacgcctatctgtgtagggcagtctgaggatccagacaaactctgcagagcctgcacattgatgaccaaacatcagttctcataaacaaaaaacgctaactgaaactgagtggtacactggcatggcataaaaaatttatcatacatttatcatcaattctcgagcttctcgcagctcatcactgatcttgctttccctactgattatatcttggttgtagttttccgcatcgttcagttcttcgatcttctctttgagctcctcctttagtttagccattttctctctcgatatcgggtcttcatcacctggcttgagctccatcaggtgcagtttcccgctcaagtgctttatttccagttcaagtttctgcctcatctccaactgagtgttcaacctcaaaaaatcgtctagaatagtttttgtttctctctacagtttccacagtaaaaccaaacaagacaaatgtcattcaaaagaaaaccgcatgcaagcacatcaagggaacagggctaaccgtttgtttatccacaagcttttgaacattttcaccagctttctcttgctccaatgcagccaacctaagatgactggtcctcattgcattctgtacagcagaagtcaaaagtatgttatacaagctgtacaatctctgcatatgagtggcataatttccattcagctttcttctgctattattttgactgacaagaacaataaaatgattgtttaatccattctatataataacacaaacaatagggggttatttcgataaggatacaaagtcttgaaatttaaaagaggtttgaacaaaaaaaagttttagacggatagacctcttgcaaaatcaccctaataaaattgttcaaccatctgacacgtgacaactaattgtagaatggcctatgtttccataccataaaatcaaaagtaacaaaaagattttgatttcaaagaaaataacaataaaaaatattttatcattctcaacatctgtaaaagacatacatgacgagaagattctaattcatgtaaggagcagaaaactacagtatatatactaatccccaagctattacgtaattcttgttgataaaacattttgcctcagatgaaagaagttgcccacctttagcttctcctgctcaagattccgtttgtcatgttctgactcctcgatttgtttgtttcttgcatcaagctcatccaccatgtcctggatattggactgtagcttccagttctcctcaacaactctttgtgtgttttgttgaccaagctttctcatcttcaggatttctagtaaaagtggggaaaaaactgttaggatagtcatgaaaaccacaacatgaataaaaatggatagtaaccactgcatgtatttagtcactcctaaatgtatcatgaataaataaccagagtattgctatgtaccttgattgtatgactggagtcgttgctccctcttctgcatcattatgttaagtgaagcagaacgcttgttgtactcagactcaagtttctctaaataaatttccttttctttaactttgcaggccaaattggacagaagtctttcggttttatttgccccttcactcccaatatcttttaatgttttcaggtcaccattttttctcagtagttcacctattgcccctagagaattgtagtcatcagcccttgccatccacccaacagtctctgtacctccacacttcatctccttccagcaatttttactgtaccctttcatcgcaaagtgaccatcaaaggcccgtgcgttcctaaaacctctccagtca

SEQ ID NO: 422 - DNA, 1001 bp, Zea mays
  source 1..1001: mol_type = unassigned DNA
cactagtatttaggtgacactatagaagcggccgcgacaacttgtccacatggcagcctttcccaaccaagagggacctcttctgtgtacactgttgcaaaagttcatgtagcgtaaacatgtcaatcaaattcctgtcaaacctaataaggcttctatcctttagggcaattccattgtttagcttgttacaaaaagaacgagcaccaaaatgaattccggagagtacagcaataagagaacaggcacactgttttatagattgatggttaaaccaaatgcccatccaagcaaggcagctgccccaaactctctcagttttacttttaggcaaacttcacaaagtgggatttgtacttacaaaaaggaagtggaatttgcttgacgctaagagcagaaaaaattctctgcagactgaactgtgaatgtttcagcatgtttgtccaccttcagaaaatcagaaacttttgcattgcatcgctgaaagaaatagcaagttaatacaagtagcaaccttgtgatactcattcacatatcttctgctatcaaatttacatcccgtcataaaaggaatgcaagtttaaaataaatcaaaatgagaaaatacaccggatttcactaaaatctgtacaaatggttgaaaatgaaaaaaaacatttgaaaaaataaatcaggagctaaactaatggagctgcaggtttaacacctttgcgagctgaatttagcatagcacttatattgtgacactgaacactagtactccagtcataatagcctcatttttcatgtccattttcagtcttgcagaatttgtttactgaatagaattgttagataaccataaaatcagaggggctagggcacgaccatttggaatgacagaacaacagtaccgaaggattaaacaattcagtgctttgctaacagtaatattcttattttccagatgagctcaccctgaatcaggatggcgttaaacagcgttccacaaaacacaagtt

SEQ ID NO: 423 - DNA, 763 bp, Zea mays
  source 1..763: mol_type = unassigned DNA
tagttactccaaaccaaacggggccttacttagagtttacctcaaccaggcttctacaaaaagaaaaaaaaacggacccaactcccataacgaaaataaaccacagggactctggtcatatgatgcagaaattcagaggcaataagattgcaaaaggggaatggcagagacacggagcacacaaaactgtactctacatgcagcagcagggcatattttcagtccagtccagccctacgtagcactgacactactatagcacatcaaatcatcaatttcgataatggggaaaaaagtacagtcagagaagaaccgctggctacctctctcattatgcgtcattccgtcgaacaccctcggcgcaggagcagatgtcgccgcacccgccgagccagcacccgcagcggcgctcgaaggacgccgagatagccaggaagcggttgatcggaaccaggctgcaacacgaacacggcacacggggccaaaatctccgctgcgactgcgagtgaccaggcgctagagcctagcggcgagcgacgagaggaaattgcgaaagcaaatatcgagcccgcgggctggtgtgggaactccggagtccggactggggcatacggcccgaaacagagcgaggattagcagctcaatagcatggagactcttccttaaagcccgagcactcatggcacgtttcggcccattgtctgcacgtgtgttttgtattctgcggattgtcgtctcccaaaaggaggaaaatctcaaaaac

SEQ ID NO: 424 - DNA, 1178 bp, Zea mays
  source 1..1178: mol_type = unassigned DNA
tttagtagtaaactagtaacagatccatatttccccaaaaacaatctccaatttgattaaatatatacagaaactattaatatatatgatcttcagaaaaaataatacattagtcgtcaaatgttttttatgacaaacatagtggaagatattatcttatgcaatcctatgaagatttagaatgttttgactccttgggaaacgagacttccattctttcctggatggagaaaatatttgggtgtgggttatcagatcacctaaaattttagatccagtaatttagtttttttcaaaaaaataggtccttaaattgatagctacagtttgtcttaaaaataaacaatgaaaaaaatacagtatatatatttcaaaactaccgagttctaccaatattcaattgaaaataaacataaatgccaggtgccataaagtacaagtatacattatatatattaacggttaatatatacatttagagtttattggtggtgagaaattgtttcattaacaaaccaaactctaccataatattttctgtaagttattactttgtatacaccttggcataccaaaattggaacccaactgtgagaactccattttttataaaacagtgccgttatacatatgattcttggatagaagataattcaacattttaagtgttgcggtgtagattgaaactattgtcatgtcactgtaatatcaaagaatataatgtatggtacggtctagaatctattttaacaaaatatagttgacatttttaatagaatatataataagaagcaaagtctaaatttaatgtgtggatgaaaaatatgacattcacttagaattagaaattgagattcactaaatatagatttgtaatgtctcaaaaagatgtagcaagggttgatataactccggataaggttttagcaaagtacatattaaaaatcactgaatgtatgacgaaatcatataaagtatataaaaattgttgtgttagatagaacaatcaattttgagtagctatgaggtataaatttatccacatagtgttcagatggtgcaatgcatgtaatagtgtaagcacatgattgctacccacttcactataaattgttgacccatcaatggtggtttttaatttagaaatataaaaatgacgtaaggttctaaaaaatcaa

SEQ ID NO: 425 - DNA, 897 bp, Zea mays
  source 1..897: mol_type = unassigned DNA
ctaagtagccacctagtcatcgtctcttcttcaacactagcagtcaagtagccaccctgccatccttatcttggccattggtaaatattaatataaatgacaatattattatctaaagtagcaaatgtgtaaactgtaagcgtatagtcgttagtttagccttcaatacaagtaatctagttatcaatttgtacaaaaaacaagaagtgaacttataaaggactaggattatcttatgacaatacaagaagtttacgacagtggatagagatgatctttgtaggttatgaagtatgttgaggtaagatatttttactaacaatttagtcttcctttctcaccagggtcataggcgagacaagaggaataatagtttctacagaagaggctatacagttgaccccaatcctatcatttaagaacttgccacgaacacatggtcaaataccaagagtaggcatgattgttaccacctattagcatccataatccatccatgcgacaatgatatacataagtaaggtatagtctagacactacatctacattatataagttctccatcgtatgttataaatatactacaccctaatcagatatcgattgatataaaagaatcttgcatgtatttcttagaagaagagcaaatacacagaggtataccatggaaatgattcctggcagatctagggctttctttaaaagacttttctcactctctccctatttgcatagtattactatgactgcctctgggtacgggtaccccgtgcgctatagcataaccggccaacacaaagtatagactaaggaccccaccatcttggtgggtcaaatcaagaagacccatgtatgaggagaagactgtatgaccaggagccctgccacatggccgcg

SEQ ID NO: 426 - DNA, 1469 bp, Zea mays
  source 1..1469: mol_type = unassigned DNA
ttactatgcaattaaaacatatattatatctagatacataacaaaaactacttaggaaaagccaaaacattttctcaatggcttgacagatgagtaccccatctttcttttttaacccctgaaacacttctctttaattcttggcctacgaaaaaaagctaaccatgcgccacagacaaaaaaaaaactaatgttaatcctattattaaagatctaggttgacatgaagaatcacgttccttcgcactgaaaaaagtttggtggcgagcattattagagcttaacacggacccccgaattaagttccttcaggtacaagatatatatgcccatgggttagtgacatggattttgttttttaacactatctgaacacaagctttggagattctccccggcctgcagctttataagctgtagctgacccacatattccccgagctgcacccacaaagatcgatcggttcggacgtcgatctcacgaccaacttcagcactctctttttacagggtgtgtacatgtcgtattccgatacagatggacgacaataccttgaactgagtacgatgtgcttagacaaaggagtacaatttcaatattaaggatacgataagagaggctaggaatgaacaaagcacgcaccttctatcttctctacctaaataggagatccccactacatgattttcatgacttttcataaagccacgtcatcatcaggcatatgaaaaaaaaaatcatgtctgccatttcttctttttgtggttttgcagtttctccgtccccacattcgcattcttctataacccttgccatttttaacgtgatactacatgatgaatttcatcaattaccttcagttgttaatatatgtaactacatgtgctctcataatgcatgttttccataagctatttcaaaaatgacagcccgcagcgaagcacggaatatcatttagttagtggagatgttttgcatcaatccaaaacagccactgtgttttgtagtacgaataatgatgcatactccaggcataattgctccaccgtgtcatgccacacacttttgatgtcaaacatatacgtaggccttgcatgtcgcatggaggccggtaaagcattggtagtttggtactcatggcctcatgggccatggcaatgatcccggtctggacatgtttaactaaaagcacacccctttcagccaaatggacagagtaagagtagcatgtttttttttttggtgtggtaagagagagatggtatttgattttttttaacataggtatgttgtgacctgtgatggctgatgatgactatgagctatgcacaaaaattgatggaacaactgctactactgaggttctaataatgttctacattctggactgaaatttggcggaccaacggatctatagtgatgatttgtttgcgacagcaagttgaagcctggtgatgaattcatcgac

SEQ ID NO: 427 - DNA, 2322 bp, Zea mays
  source 1..2322: mol_type = unassigned DNA
cttgaacttctttaggaccaacaactgccatgagtggcaccttttgtgtttcagcattccttattagctttggtaggcgctctccatgacagacttcaacacgtagccctcttgatttcagttcggaggccacctcgttacagtattgcaactgaaaatacaaagccaagatgtcatggactcatggttacataactaatactaaggcaaacacctatctgaactataaatgcctcttcaatcgaaagagaaacagataatccagaatatcagtgaacatatgctttcaattctaacaacacatggtgaaaggtaatgcaaagcaaattatcaaacctcattgtctgtcacaggtagaatacgtgtctgggttggggcaagccaaagtggaaaatcaccagcatagtgttcaatcaggacaccaaagaagcgctccaaagacccaaggatagctctatgaatcatgatgggtcgctttttctcagagtttgaatcgacataggtaatgtcaaaccgttcaggcaaattgaaatccacctataacatatatggaaatggagtgttagtgtatcccattttctctttaaacaatttgagtagaacaaatcgcattacagggcatcaaacttgtgttgtacatgcaaataagtgaatcacctgaggtgtgccaatgtcaccatgcaaataaatgcaacctgtctaatcacgctaacatggactccaagttttgttcaacatggcaatgggttcacagtagagtggtgtgccaatggtttatgacctttgcattgaacccctgcatgctaatcatattagaacaaatatgttcacaaactatttcatgtgtttagacattgactccagcgttgggtagtgacatgacggccacaagacggttagtattagtgggcatgatgtgaaatggcggcaacattttcactagggcacagccacaggaaaaagaatctctgtatacgggatgcagagaagtttatatgcagcacaactcagatgtcatcaatgtgtgcatcggttgggttgcgcctgcgtgatggaggcgtggttacagaaatcactgggttgcatgcatgataggaaaatattcagacggcaactaaacaatgctgcacgatgctgctctgcatcacaaatgcagagattttttttccacgcatgtatttatctggcagcagcacactagccataaagtggttagcagagcaatttgcattgggtaggtgaaaactagtatactaccgtgtagaaagttagggcaatttataaggaacatatggattaaaggatattggaagatttttttaattattataccacatccttcactatgatttccatgtcagtgttcttagattgacagttcgtcgtggtacattattggtaatctcagaccatccggttagaaagtttagtcatggattagattaattttgaagaacggcgacatatttacatgtacaagacaattttgatgactttcaatgccattttcacatttgagtacctcttatcccataaaaaatatatgatttacctgcacagtggaacattgccatttccttccaagagcatcctcaatttttagatcgatttttggaccataaaaagcacctccaccttcatcaaccttgtattcccaacccttatcatctaatgcattcttcaaagcaattgttgctttttcccatatgtcatcagtgccaacagatttttctggtctggttgaaaggtttatctcataataccgaaaaccaaattgtccaagtatttgctcagttagatcaagaacacctctgatttcatcttttatctggtcctccagacaaaatatgtgggcatcatcctacataaacagaaatagttgaaatctgcgcatcatcctacgtaaatagagatagttgagaattgaaaacaacaccgagagtaattttgaactttataaagtagtggtgagaaaattctagtaccagccatccagtgctatgattgttagcaaaatgttacagagtagactatccatattccataacttaagtcttaagaatagtatgcttagaaaagaactgaaacaacaggtgctgagagctctgctgtctgctgtgtaaacgaatcagaaaaaggtcatatgtggactcctgctggctatatgatattacataaccatgcataaaggcataaagcaattaataatataatgccaaaaggtacttcagggaaaggagcaaaggctgcatagcagtactaaaaagaatgtcattcaaaaataaaaacatcctcagtattgttcatctcatctagcagtag

SEQ ID NO: 428 - DNA, 4296 bp, Zea mays
  source 1..4296: mol_type = unassigned DNA
gtatatggtgattggttcttccttaatgctctccaaaatctccagcttgtaaggctcattgagtgcttcaatcctcttctgagcctcttctcgggacacctcctccctcaccaatgggaggttctgtcggatgatccgatcctatcaaacaattgaaattaccaaattgacaaatcaaaaccgccactatttttttccctgaatattaaaacagccactttgcagttcaggtcaattcgcacatgctcagtgcaggaatgcagactcaccatctccttcttaattttcttgaggtccttatccgtcaagggctccatgtcgaagtcgtagtagaaaccattctctatccagggacctattgtcaccttggagttggggaagagcttctggacagccatggccatcacatgggcgcactacagcaacaattgtgaaagacagtatactaaggtgtctatagttttgacgagacactaaactgtacaggtattagagtgacgggactttggtgagaaccgagaccaaattaagcatacgattaggccagttcaagcactgtaacatagggggagaaggggagcggcagtacggtgtgccggatgcgcagaaggcgttcggaggactcgttggtggggagcaccacccgctcctcctccgcgtccccggtcggagccgcggccgcgggagcatcttctactggtgccgagggtgaggcggtggaggaggaccgcaccgcagtgtatgggagcctgcgggctgaggcgggtctgaggggcgggaacccagacagagaagcggccgcgggacggtggcgcggtgacgaggggaagagcgagccgtggtgggggtgggagcggagcaacggggcggaagcggatggggccgccattgtggcccgggcgacgccgagctcggggagcgtgtggcgggcgttccgccgttccctcgtctttggcacgccgcacgttaccccgtctggacttcggatatcgttcggctgaaccacggaacggctcgttacttggccgaaagatgacccgctgccggagaacgctgaaacaaacacggattaactgttgcgtgcaaacagaatttaggggcaaacgtgtgcaagtaagtctgcagaacgtttagatagatcatggtttaactgtagatgcggagctcagcagggccacgccaccgtgtgttctttctatctgggattgggatgctcgtccaggtgtgtgccgcgcgtgctccacaaacagcaggaaacgctacaggaattagcggtggcacaccgttctcccttctccgagaaaggcgagcgccgcaccgtcacgtcaccgccgtgtcttcccaccaagctcgcgcgcgcgcgcgccacgccacggaccacgggccacggcaccggagccgcgtgcgtgccggcccatatctgatgtctctatctatccactgaccagtccccatccgcctccgaacccacgaggccacgacccactactacatcagtccaccgccaccgcgcaccgcgagtccgcgacagacatccgcgccccggcctcactctcactccccagtccccaccgtgccgccacaagcgacgcgacgcagccacgcagggagagggaaatggccacggccgcgactgccacggcggggagtagagcagccgtgctgctgctgctctcgctggcgctggcgctggcgctgcggccctccgacgccggcgcgggcggcgactgccacttcccggccgtgttcaacttcggcgactccaactcggacacgggcggcctgtcatcgctcttcggcgccgcaccgccgcccaacggcaggaccttcttcggcatgcccgccggccgctactgcgatggtcgcctcgtcatcgacttcatcggtacgtgcgcgctcgtacagtcgtactcgtacgtctcgcctgcggcctgcccccgaaccactcggccgctgaacccgccgccatggacacggtctgcgcgggggttttcactgttcaccttttcacctgccctcccatggccatggctatgattgcactgcgcgtcgggcccatcgattgacacacccaaaaccgccttcacttgccgggaccaatgaatgcacagcgttaactcgttctgcctttggtcccgcggcgaagataagtttggggcaaaaaaaaaaaaagatagagcagtaacctgtaacaaggactccagtacgtacggcttttagagttttcgttagtaccaatcaccatctgtttctcacttcgtctcggctggaacgcgacgagcagagagccgaaccgagcaagcagaagcagacggttgctcaggatctctgaaacgacaaagccaaccccgagtccctgacacgagaccatgacccctgaaacaccggcctcagaccatgtgccgcgtgccggacgagcatgggctccgttcgacctcgaccggcccatgcgcgtgcgggcatgtccccagggcaaccatgatgcgcgtccccgtctcaatccagcacgtgagcacgcgtgtcgtgtgattattttgacctgcctttctggcacgatcttggtttcattccaagcaatctgacaaaaagttcagtgattcgggcaaagtatctttgcatacgatcataggccactgccatgctgttgggagatacagtacgagcaatggagatgccctgttgatcttcctttagccctttttattttagacgaactcctctttaaccttttggggatgctgatattgggaaggacaggaagaagcattagcctattgtggtagtaggtacatgaaaatatagtgggggcaaagcggcatgaggagggaatcagatttgggtggcagtggaggaatattttttatcaaatacggatgtttcactttatagattgtcaccagagttgaaggataaagggtgacactgacatttttttcttaatctgtcctttggtaactttaagggtatatataacactagaatctgaacagcagacagtgggaagtgctacaaaacacatgcaggtcctgttcgaaatgcatgaattcagtaagaaactgaatgcacaaggcttcaacttgtatggaactacctcgttctatatttctactgaattttcggaaggcttcactgtgtttggccaaattcatgcacctcgcagtttagatttcgcaatgaatgtcaactggtaacagaagcttctgtccctagaggcctagacttcgccaactggaatgtactgatcattaagtgtcgagttgttttgccatagactagcgccaagacagtaactcttcagcgacaaatgatcaaatggtgcttcttgatttactctttatctcttcgtttcccgaactgcagctgaaagcctggggctgactcacctcagtgcgtacctgaactcgatcggaagcaacttcacacagggagccaactttgcaacagctggttcatcgatcagaagacagaatacatcgctgttcctctctggtttcagccccatttccttggacgtgcagttctgggagtttgaacaattcatcaacagaagccaactcgtctacaacaacaaaggtgacaacagaaaccccccaaaccatctccatcagtatttttatgttttatcccgtcaagattttattcagtaacacttactcttctacatgtaggcggtatctacagggagatcctaccaagggcggagtacttctcccaggcactttacaccttcgacatcggtcaaaacgacatcacctcaagctactttgttaacaataccaccgaagaagtcgaagccataatccctgatctgatggagaggctcacatctataatccaggtgctctttggcagagcaagcatcaagttgctgttgctctttggaagatgttaccacacacaacgttccatggatggtctgctcatttagctgaatacatgcaaatttgcagagcgtgtactcgcgtggaggaaggtacttctggatacacaacacagggccgctcggctgcctgccctacgcgctgctgcaccgccctgacctcgccatcccagcggacggcaccggctgctccgtcacctacaacaaggtcgcgcagctattcaacctcaggctcaaggagactgtggcgagcctccggaagacgcaccctgacgccgcgttcacctacgtcgacgtctacaccgccaagtacaagctcatcagccaggccaataagctcggtaaggcgttcatgttggtgttgtttctaaattctaatgctggctggctctgaacgtttgtgacttgaagtcgcg

SEQ ID NO: 429 - DNA, 1922 bp, Zea mays
  source 1..1922: mol_type = unassigned DNA
tgttacatccttgcatgaaggctgattgtgttgggctgtagactttgtctgtcactaaaatcattctgtgtgtgaagttcaacctttgttaaggaggcatattggtctgtattgctgaacgacattagcgtccatgacttaagggataggagttattaccccaaagtcaagctgaatatatagcgatattttgtattttgcggatcaaattgaattcattttgtatttttctaattttgtctgaatatatagcgatattatttagtcatcacctaggtcatctttgcggatcaaattgttatactttgtgtcattatgaactcctaggcccagtttcgaatcacgagtctcttgctgcttcggccactttgtcttttttgcctaatgctggaatccttcccagctccattataacacatgctccatgtcttgcattatctttatgggactgtgtcatgtcacttgttgcttgttcttccatcattctacacttcacagctttattcatattgtgatgctacttgggctattgattcctctaatgattattgtgtttttaatgattattttattgcttggtagactaagtagacaacactttcttgttcaagtgcatagggtgatttgcatgctatgactattgtgatggctaaggtgatttgtgttgattgcttgtagatttatgtgtttctatataggtgctataagtatcgtacgtcctccatgagcgtagtaacaaagtgaggttggtgaatgactaatgtttgccatgtggccaaatcatacttaagaatttaacctctctaaatcaaccaagaagaagagtctgttccccacatttatgccttggccatcttccaataaagaagaatttcaaataatcgaccttacaacatgataaagatgattaacaggtgagacaagtccattttgggattgttgtgtttttctttgctagtggacgtacccgaccaagaacatttctcctcatacccaccaatagttttaatttcctcaaagggtcatctttagtatcagagaactggcaattagaatagcgtttgtggtgaattttatctattcttcctaatcgttcatcttccctatcaatgtcaactaaatcatacacaatcactaggtagcactcaataccacaagagaagagagcaactcacgctcatgacaaactctacccatgaattatttttctaagctctagtaaacgaaagcacatcaccacatgattttttttagaggaacatgtccacaatattaagaaactaatattacatgttatggaaaagtcttgaataatggaagaaaccgctttctatagtaaaggtgaaataaaagattaaagatgataagaggcatggtgaagtctaaagctacccatgattctataaagccaaatacaccagcataaaggatctaggtgacaacgagagtaaatatgattgtattgtgtggaataggtcaatacaaaccacatgtgtcataccttgttcgatacacattgaacaactaaaaataacatatattacattagcatgtatggacaaatttggggttagtaagaaaaaatacaatttctagcttctcagctgattatggtatacaacacgaccaacataaaattacactaggaaaaaaaggtaagattagaggagccatcacagagcatgtgaaccctactagtatgaacaatataaattttggtacttctttctagtagggaagcgagggaaaagattttgtgtcttctcttgttctcgaaacatatttctttataaagttacaaatcagctaaaaagatacaaaagtttagatgacaagttagcccatcataaggtcagaacattgttgatgatacgtaactttataaggaaaaatgttttgaggagagaagatagagaatcatg

SEQ ID NO: 430 - DNA, 792 bp, Zea mays
  source 1..792: mol_type = unassigned DNA
gaatcatggttagctacagacttcaccatgtctcttttcattttactcttttaattcacctttactgcagaaagcgacttcttccattattcaagacttctccagcacagataatattaattcattaatataatatcgagatggtcctctccaaaaaaaaatcatgtggatatgtgtctaggtttactaaaacatagaaaataattgatggatatagtttgtggtgagagtgagttgctctcttgtcctataatattgactgctaccttgggattgtgcaatatttaattgacatgaacaacgaagatgaacgatgaaattcaccaccgtattctgcttgttgccagctctccgatagtgaagaagtatccatatatagatgaaattaaaattattggtggggatgaggagcaaggttgtatgatactagatgagactgtcaagacttccaactcctagagcctcgtatgtattcagtataaccacatgctgattcgaccacatatgtattcaatacgtaccatgaagcgtgatttgaaataggcaatgtagagggagaggggcgctgtcaaagttgaagatggcattctaatttaagcgaccggccggcgtgaattttggcacaatgtaatcaagattgcgggcagttagcagcacgatccaccataattaatttgctttgtcacaaaaactttgcatcttcgacatcgaagaccgtggtataccagaatggaaggggcggggctgagttcatacgtaccatgcatggcctcagatccgccctgggctgag

SEQ ID NO: 431 - DNA, 586 bp, Zea mays; identical to SEQ ID NO: 335
  source 1..586: mol_type = unassigned DNA

SEQ ID NO: 432 - DNA, 1051 bp, Zea mays
  source 1..1051: mol_type = unassigned DNA
tttgggactaaaagactccaacatggcaaccaaaaacctattctagattctagaagatgaaactgaaaacgatgcagaagcgcgagaccactgattagctcaaccttttaaaaccttttcaactaataagtaaataagaaagtcactgtagcaaacagaagaaactggttcagtccaatttcaggcactaataaaagttccagaacgacaaatggtcaccagcaacttcttaacatccttccagatagaacatcagttcagctcatcacatcggcagctcgccgctatctgctatgacaaccttgctctttggttgcccgctctgccggccctcagcttccaccttgtacacaacatccattccagacaacaccttgccaaacacaacatgcttcccgtccaacctaacgcacaaaataaagcaggaggcaatcagtagcatagcaccttcagtcaagatcggagaaaatagtcactgttaccaagaccagtgaatattaacttaccagcttgttgtcacggtggtgatgaaaaactgagatccgtttgtatctctcccagcattggccatggacagaaggcctgactcaacaatcatattagtaaaaggatcctaacaaaccgctcgaataaaccattgttatgtaacagataggatcccattttagggccacataaaaaaatctaaggcgtaactggtcacctggtccagtgtgcttgatcttgaagttctcatcagcaaacttcatgccatagatagattcaccacccctcccatccccaagagtgaagtcacctccttggagcatgaagctgggaatgattctgtggaatgtacttcccttgtagtggagagctttgccactcttgccaattcctttctctcctgtataaacaagaaagttgagagccacatgaaaccaaaaccaaacaagtgacttgtagctatctagtaagacatcacttagatatttcacagatgtaaaactattcaatatttggaatgggacctcttccattacatggcaggctaactataagatgttttgct

SEQ ID NO: 433 - DNA, 610 bp, Zea mays
  source 1..610: mol_type = unassigned DNA
ccagcggcgctgattcatgtcgtaccgtctagataggagttggcgataacagagggcaacaggaggagggatgagccatggtaagcttgaaggttagagtcgaacgaggcaactggagaggtaaagaggacatctaggtatgagaacatttgcgagtgtccatgtttgtgaattaatgagtgagagacccgctacaaccccgatggaacgacctaaattacatgtttgcagggtcgaacgactagcggtattggttacatggctctttctgcaagattcatattagaagattgggcttctatttggtaaaagaagaacaaaaataactaatatttctaactaactaggatcaatagcacaagacatgattttgtttggtgttaccagatctaggctttaacatatccaactccttagcaaatacaaactagcagagaatttgattgagtacggaagcatatcaacggctgacgaattgcataaaccggataaaaaagttgacatataaatataaactagtcagatgctcgttcattgctacgatttctatatgtcatgtgactttgttttaataaaatacaaaaaatattggttatgtgggtatgaatgt

SEQ ID NO: 434 - DNA, 2215 bp, Zea mays
  source 1..2215: mol_type = unassigned DNA
ccaccacttgtggataattttaccttatttttccataaccgtggaaactgatgagcatggatgttgaagttgatgtttggaccatgggttggattagaaaacttatagggatttttttacaaaagggatgacggtggaaaccagaaaaattggtgccctataatagtagagaagagaaagtgaaacattaaagagagttttgaattggagattatcttgattgtttgcggtgattttgttcccgttgtggcagaaagtggtggttctcatagttgtggtaaagttttcttgtcagggccttgtagcctaggacacatcaatttacatacaaaagggcttaagctgaaaaaatcttcgacaactcagaaatgtgccccatcgattgttcaatggctcaacgtggttggaagagtccatctaaatactcagtgttccttaaaaatataactacagtaggtaaaatgtaaacacctaaaatatttctaaaagaactatgtgcatttcgaagattggtcgttatgcgacattgactattaaatttcaagcaaacatgaaaatatcatggagaaagaagttgttattttgaatggcagtaccaagaattatcggcaaactagcagcaacaacaacaacaataaggtatatgatatttttccttcatctatgtgaattccgtctttaaattttataagcaagttagttgacaatattgtgtggctttataggccacaattttccccattttctcttagaatacgactatggaagtgcataaatgtcctttagcgggataactagaactgtcatgcaaatattcctctttgacctagttattagtcataatccagttggaatctatcggaggtatcaactttgataatatagatgaatgtatcatgcattcaaaatcagaaggataacgtaaacgacataaatatatactgattcaaatattaggtatgttcaattaagagtatagctcttatctcgtatagtgaagtttactagagcgctagtggctagttgcatatataatgtagtctaaaaatatgtatcgtggattcaaatatgttttatagttgattacaagaaaacttaaatagaagaacgaccatatcttttagaagtcatcgtccaatctctatgtggtaagttacttgtccatcatgtctatcgatgtaccctcgtttgattaggcctcatcttcgctaacctaatgttaatgggcccttgttcaagtggtgagttgtcctaggtccatatgattgacattatatcccaaggactttgatgtcaggctagttgactgattcaatcctttgagtcctccaagcgcctgcgcgttgatgcaaccttcatcttccacttattgcacatcattaagtcatgctatagataatgatgaatgatcaaagaaatcttccaaacacatgtgtgttgatgcatcctctcttgtacaagcataatcgacttcgatttagggataaaccattgtcgggtatgatcttatcttatactcataaggactttgttatttatacatctcataatcatcgatatgtctttgttcctgtacacgtatccaatgtaacaagctatatcaatagctagaaggaatcacctctaaaagctatggaacaaaggaggtcatcgagttttgtgttgactttattcctagatttaaatcgattgatgttcctcaattgtggcatgaggtgaggctaagtgcatagggcacagtaggaaggaaagcaataattagaatgaataaagattatttccataaagcacgctgctcggttatgcaaaacatctcctggatggctttgtatatttaggaacacaagaatattctatactttgacttcccaagggagcctatagcccaaattatgcgtcgacatatgaaaactttttatggttggttgcgaaaaattttcgcgacaatgacattgttgataaacaaatatacttgttgtcttggagaccatattgcaatatctggacattgcatgagtatgagataaatgagactgttttgtacaatagcacaacttaaaagagcacaaaccaaaacagtggagttcacatatatgcatgtacctaaatgggaataagaaaatatattatggttacgtagaagaggtatgggaaattgactaaggaccttgtttagggtctctttgttttggtgtcaatgggtgaagctgtccgg

SEQ ID NO: 435 - DNA, 2159 bp, Zea mays
  source 1..2159: mol_type = unassigned DNA
atgttaaggatatgtctaccaaactgaagaatgggaaaaaacaagttacacgacaaaccaaagcattgtatagttcattcaaggaaaagaaacattgtaggcaatcaagggcaagtcataatcgaacacgtgagaagattatgatgaaaatgacaaaaatcaacccttcacaattaacactaacccaaccattctactataacaagaatggtccatggttatggagcaatcataaccaagtgacatatgttaataaaagtttattattgttccttctcaataatgatgtttaataatgcattagatttattatacaataattataaagtagttttatggaaccctaaatacaactcctaagtttccatagctgtggtgaattttgttgtatgtgccttaaaaattcatgcttttatgtgccacaaattaaggaaacactacgttttagatttttgctattttctatagctttgatgattttttgtttagcgatacaaagtgcttaaatgttgaattgacgctaccctagaaacaatccaaaatgttaccaaacttttgtattgggtctcatatggctcaatgaactaattttgttgtacgtgtaagagaaactattttattttgaaaatgtaatttaacctcgtttctccattttatcacaaagtaaatgcaataataaccaaaattaactaaagatcgaaatttttgtgtggatccatgctttaagtctaaatgcatgcaaaaaagtaaaaatttaaacactagcgtatctcttctaatatataaagcgtcagttccacgctcatctgttcccttgacctctccatgctctccacatttaaatgggaaaaggctaaaattatatagaaatgatgattcgaaccatggttgttgcctctaaacccatattcacactcatgcggctaatataacacacatatcattttgttttatactttatattcaagcataaatggaaagtgaagtgtttgtgccatttcatgaatactcactacaactcctaagtttccatagcgctcgtgcaatttgataatattagtgttaaataggacaaatttcagaaactttccatttcagtgtgtgaaataagggaagcgtaggttttttcatggtcaaacctggaattttatcaatttgttgtattagcaaaatattggactagttgttatacagctcgctagccaattataattaatctagacaatttttagcgttgttagaagttaaactgtcatatcgatttcagttacaagacctgatcaagatgctctacaaaaccattatcgcagcagcacacttctgcaactaattcctatatagtgtgttttccatcatccattatttgctcgcgtcacgggctgcagcgcgctggtctgaagaagcgccaaaaggcaggcctggtctcgatcgaaatagtggccgttccggcggctcgcgcgtcgtgtcgtccacacgtacggcgaggacgacatgacatgacagttccgatgctgctgcaatgcaatgcaactgtgccttgcaacatggcagccgaaaaacagcaatcattgacccaagagagggaaaccacgatccaaatcgtcgcggcacgcgtcgaatcaatccgttcgatgcatgtaaccggcggaggagcaactagtagtactccctgggacggtgactggggactgccgggcggtggcgagtggacaggtgagaggatcggagcagcccgcgcgctacagagcggggaaaggaaaaggagagcagggcctagggtagagggttaggtcgcagcagtgctgctacggcaggccgctagtagctccagacgacgtatggaaatggtcgcaccgttatgcccctgtacggctgtacagctgtactctgtacgtagacgatggcgcatggcaccagatcaacgtgcttgccagttaagcaccccggccgggctagggctagccgtcgtcctgctcagcttcctcgcggagcagatcaaggacacgctcgtgactcgtccatatgtcgtcctcgatctgctcgccaccgtgagcggtcgcagtacgtcgtcgggcacggtagaggcatttcgcgcgcttctccaagcgtgccggatcgtccaatcgtctgccacataccatattatcgtggtgcatgct

SEQ ID NO: 436 - DNA, 1308 bp, Zea mays
  source 1..1308: mol_type = unassigned DNA
atgtgaagtatagctttaagtagtgatatacaatggagttcaaaatgctatgcctgtaattagacaagcaatagctactctgcaatttcctactcctaaaaaaccagtcatctttgacatgatcaaacaaaaggagagaaagatgaatggttatgcacttcttgatcaactaccagcagaattagtgtttcatgaactgaaaccatacatagtgctgaactaggaggaatctagacaactggttgataactgatgcttcaaattttaagaaggaatatagacagctggttgatttcttcaatgtaataagccgatgtttaaatttttaattcaaagatgcaaggcccgacctagcccttcgtccagggaagcaaagaactcggatattatgtttcacaacatgcttgaaatcatagctggaaagaggatagatgagggaagaggggaaggaagagagtgtaccagctaacccattccgtttcaaattatgtagaactgcaaaactgcagtactgtttcggttaagctaatcctaagcaaaactgctttggttcaagttatgcaaagttaattttcaaatcaataaaaccgtggtactgtttttgaattaaaagagaaatgcacaacacgaataaacagctaatgtacttctctcttgaatacatgctagaagtaattatagtctaattatgaacagataacctggatctagataaacagataacaaaattaaggcaataaacatatttctcctctagcaataaacatgctctcgaattaaaagagatatacacgacacgaataaacatataacctgcagctagataaatagctgcaaattctcctcctctattgaagtatgcagagttttattggttcaatctaataatactgcaggactatttcatttgcgtcccttgcatccagataacctgctagaagggaactttactcttttcgaattaaaagagatattttgagcaaaatctgtagcctagttctttgcagtagtctagttctttgcagataaccttgagtagcctagttctttgcagtggcggaaacttgatgaaataaaatccgtatgatgctagctaggactttggagaagaatacaaaagctacggccaacctctcgtataccaacccattattgtttactgaatcagtggcatgtatgcttggaaaatacaaaaagttcaatacgaatggaggaaacacaatctggatgagctatagccgattgacgtcgaaggcaaatgctactgcttttctatttggaatcgagattcgagattgctatagctgg

SEQ ID NO: 437 - DNA, 2202 bp, Zea mays
  source 1..2202: mol_type = unassigned DNA
ggatatttgagtagtcattcttgatctcaaactttcataatcgatgttgggttgctcagggggaaaatgatgatttttttttgatatttaggaaaaaaataccatgatctttgtgcacaccaggaaagagaagtaggaaaacactaattgattgcaagtttacagttttcatgccaaatacaggcccctattaaaatttatgctctttcatataatcagtgctctaaaataattaagttcatctccttaattgtgtataaggaaatacttaaaatacagcccttactccaagtcagtaggtcaaccgtaaagataccaacagaagatagaagttctctaaaaagaatgtttagaggacacgttttttcattgcaagtgcagaatgttattttctttcatttttaatcttaacaattacaagatatgtcccagttgttgactgcttgactgatcacctcttatactaatatgtagagaatgggaaacattgatgacgtcgtgcctttcttcgggagaaccttcaacaaaatctacccactcattatggttgtttataccctattggtcgctgtaaattttttcgagcatctgatagacttttttgggagcttgaaaaggttcaagtgctggactgaccaagaaggagatatggatgggttggatccgtctggagtattcattcttcagaaaggtaagaatttcgttacgagcagtaccttgtgtctgaatctccgtcgcagcatttcctatcaacttatcatgcttacacagaccattccaaaccctgcttggttttgagagaaaaaaataatcaaaccctgctagtggtttcggtaacgtgaagcttgttgctggtggttttattagaaaccctgcttagcttggttatagaagtcattttgctccagcgccggcttgctctatctgtgtatcgtctgtctgatgttatttgctttcttctgcagagagaagctccatggaacaaggacgcaaagtcagtgagcatgcagctccactagcaagaaacttcagctgtttaggcgaagacgtcgaatctggaaacataccacaggtgcgaattagtctggctgcgtcatagtccttcttctagtccatttggaggttccactctcagctaatctttaacttgttttttgcacagggtgacggtacagtggagacggagccggaacgaaccgccgcccagccgaaacacggtggcgatgtcgctcagagtcagagatattctccggcgagggaacagtgcagcagtccgaaaccagtggaggttcagaaggggatctcatcgacctccaaatccaatgagccgccttgtgtgagtgcggcggcagattcaccagctgagacggcctcaaggtgggcctcaatgaagacgggtttccagaacctcagagcgaccatgggcggctccaggaagttcctcctattgggcctgtctcctagggccgggacgaacgaatccgctacggaatcactcgacgagatcttccggaaacttaagcggcattcgagcaacgcggatgcgaatcgactagacgacgacgacggattacctttttgaccaacggtaggggcaggggcagcaacacagacgagcgcaacactgttgagaccggcaaggtctcgtcctttcgcttggcgtatctctcacgactcaagtctcaaggtagcaaacaagaaagctaaaggctgggaaggagtagagggtacactggatggcagggactagaccaaggtacagaacataaagttttctgtatgttcgagggtaggctagacgtgccacaaataggacaaaaccctaaaaatgtacagtacgtgcaagccctagtatcatcggtgggctgccagatgtgtttgtggtcatctgtcacgctattatctgattgcttacttctgaacagataactcccaaaaaaaaaaccatccgcaacggagaatgcataataataataacccctctaaagaaaagattgatgcataatgaaggactgccaaagcagtgtcttagttgtacgccactcctttatccgagaatattggttacacctgccatggaagaccaagtgcctagaaaagcaaaagttgtgcagctgctgatgcagcaatcatgttgtcacttgcgattggaagatgttcgtcgctacttgccaaaacaggcaaacgactcgctgccagtag

SEQ ID NO: 438 - DNA, 526 bp, Zea mays
  source 1..526: mol_type = unassigned DNA
gcataatccttctctttgtttggttgacgacaatatagaacctcgactggtagaggatatgttgatactgacaaggtattcttcatccactagagctagtgacgatgaggaccttccatgctctcctttagctccatcctcacaatcgactacgacagttagacatgggcgtaagtcttataatagctcgtgtaacacctcaaaataatattttgagtaatctagagaatgtattttcaggatttaaagtttcatatgtgttataataaagaaattgaagaaactaaatgaaagcgaaaagatcttcatatgaactaaattacttctttgaataatatatctgagggacgttcttaaggaagtatggataaaattaccttttaatgaatgttacacattagaaattactcctttcttatttatggtttgtgtgttgaaagcataaattatactcttgcattcatgtgaagttttgtctgttcacttaaattagttgaacactatttgaatttatttcgaaattcgg

SEQ ID NO: 439 - DNA, 609 bp, Zea mays
  source 1..609: mol_type = unassigned DNA
agttccaaagccaggcatgagctcatctctagagaacacacctgctgtgaattgccactcaggcctcatatccccaaccattacccctactcacacctattgtatctagataaagctgtacttgtttgactacgtcaggaattctgagttacactccgcaacatttatcatgatcagacttttttcatatttcctacttgagcttgttgccttttggaatgcttctgtatgttgatatgcgcccgagtttgagcatctgctggatgcggtcggcatgcatgctgttcgttttgttctgcgtattgctctttgttcaactcctatttcctacataactagcacactcctatttcctacatattttccccttatttatacatgttgcctccaggtatatgtttttcggttcctccagttatgtacatgttgcctcctctggtagatgtttcctcggagttccctacatgtttcctcaattcctcctgtataatgtttgccctttttttgtatatgttgcctcctggtgcatgtttcatccatgcttcctccgctttattcatgttgcctccattataatacctcagttattataatatgcccactccgtta

SEQ ID NO: 440 - DNA, 654 bp, Zea mays
  source 1..654: mol_type = unassigned DNA
gtctaataccttagttattcctgtggacgcactcagttattctctggtttcttcccttcgcgtcctctcccgccgccgccgccgttgaccagatgggtcgcgtcatacgcgcccagcgtaaggaagccggctccgttttcaagtctcaggaggactggtcgtctcagcgaacaggctgcctcagccgcagcaaagtccgacaaggccacttagacaacttttgcggttgtttcaattacattagttgatagtcttctttgtgataaaacagttaaagctaaatatcaaaatcatatcaaagaagctgtagatttctgaaattttgattaattttctttttagcaacatctgcaggcactctgtttccaaatatgccgagcatgacaaggagctgcaaacccggtgcagcccacaactgaaaatccaacaagttcttggcctgctctgagaaggttctcccaagtccatcttcaaaagcttcagcagatgaacaatatgtcaaaatgtacgaagtgctgaaaatagtatctgaaaagtttcctctgagacagaaaaataaaggtggtgctagtcaacagaccaatgaaggtggtgctggtcaacagaccaatgaagtacctgctggacaacagaccaatgaaggtggtgctggtc

SEQ ID NO: 441 - DNA, 533 bp, Zea mays
  source 1..533: mol_type = unassigned DNA
gtaaagttggctcaacattcggataacgaggagatctccatgcacatggacacagatatgctcgtcagacattttttcagtgtggtcttaaataacctgctactgccacaaaagtctatttttatgtaacctcacctgaacttcaagctgtatatgacctagaaaagttgaaaaaggttgactggtcatatgtgatatttcattcattaaagaaagctcttgcactgactttaagaagaatccggggcatatgaatggatgtgtccttatgtttctagtaagtaccaggataatgcagagcatatccataattccttaaagtaattgtttttctcatgttgggtaggaaagtgactaagtgaagaatcgttggttcacaggttgttttcatggactgtattcaaaggaacagcttggacacaatgttgcagaattaacctgtatacggaggcaatggtcgataaccttttgagtgcaaaaccaattaagaaaatcagtaagaggacaaaaagggtacgtggacaagttgtcgc

SEQ ID NO: 442 - DNA, 2195 bp, Zea mays; identical to SEQ ID NO: 397
  source 1..2195: mol_type = unassigned DNA

SEQ ID NO: 443 - DNA, 3289 bp, Zea mays
  source 1..3289: mol_type = unassigned DNA
agtattttctttttccacacacataatttcttcttgaaacaagttatgggcagtaaagcacaagtgccacatgtacatttctaaattctgccagtacttaggtaggtagtaacagaaaccacatgtacatttctaaattctgccaaataacacgcaacatgaggcaaaagggtcatgacgcttgagttacacagccctagatcctgggaatcaaatgtcatccacataaacctcaactgaatcgtgcattcgtatcggcagctagatctgcttgtaacaagtctacgctaggagtaagctgggggtagctttgagcagtaccaaaaacaagctacagcaaaagtcatacttcaggcacgccatgttctagagctctcctgtaggtaagctgggtcatggatggatgttaggcaaggttgccttcccactccactcagtccaaggaactgctgcggcgctgcccggttaaccaagtgtcaagctactgcatctgccgagcagttcctcctcaacaatctgaaatgaatgaagtactggatcagatgcaggctagtaaagaacaaacaaacaaaccattaaagattaaactgtggtactgtactgtaacaggtagccgcagttgaatttaccttgtaagtttcaagcatcagctgaccaccgatttgtttctctgtcacatagctgacatatgtttccatcaaaggagcattaacagcctgcaaagagtaaaatcagcagattgtctaatgcttgttgcatgcatgcaatgtacagaatcccaataaagcataggcagcagcagattccacttcccaatttaacacttcactcctggtagccaagtgtagagagcgcataaattgggaaataaacaaggaacatatgaattttgagttcaaaacgaagtgcttgtccaaaatcaaatttccttgcccacgtgcaagtgtaatcaagtttgggcaaggaaaccaaacataacaacaacactggataacctacatcaattgtatgatactacttccaacagaagcaagagcgacaaatactgttaacgtgacagtagaaagaaacctgcaaacagagcgggtagctatccccacttgaaatttccagatagtaagccagcctcttggtttccatttccatactttcctcaacctgtaagacaccataatcagcagtgtctacaagctgtagaagaatgccattgattcctacaatattataaatatattgaccttagcaaggtaatctggcaaggagtagtgcttaatccattcggaacttctcaccgagtagtagccatatatttcatcaagaaaagcattttgcattatggattttgcttcagaacaacatatgccatgcataacatcccgaaggctcgaatccatcctgatcccatcacgttcttgttggatctaggatcagcttgaatgttatgtacagaaggaacacgttgaacaaacaaaaggtgaaagacagctatctagaaattaccatagtaagaagagccgttcttgcttcatcattgaagtaggaaaagacctagcagatgggcaaaagacataagaagtgggtaagcagtcaccttcacaagcaggaggaaatgtggaagcaaaacattttcttgaataacactcactggatcaaagaaagaggtagcagcagtgttgctaagcgatggtagtttgtactgcttcacatagcagcggtccaaatagctgaagaagccaattacacatctaatcatgatgcaatagtttgaccacattttcacaagctctctgaaaaagctgtcattttgcttgtgcatgagatggggcagaacctaatatacaaacaagagtgaaatatgtcaagacggggtaaaggaagatatccttgccaaaatcaattaacttggtaagcatctctaaaccgaattgtacacagatacatggagtatatctgaagtgaggtatttcaataaaataccatggttgttctacagtaaatcagggtggtctactacagtaaaatgtcattatagacgtatactgcagtaaagcagggaaacaacagtaatgcacctcctcctttctcactctgatccatatctattttgtttgtggcaaactgttttttattttgtcaatgaaaatttaggtaggagcctcgcttccagaattcctaaaaacagcaatgttttatcatgttggtatatgagtatatgaccgcacaaatatgcacagttacactttcaagtttcaaccatagtagttcactactgtatccactttatttataatatgagcacatgcctatttcatatcacatcaacatatcacaatcaagtgtaaatttgttgtgtaagtgtatctgattttgttgccaaggcaattagatacacggtggcttttgcagcaattcctgctagtgtcagctcgtaatttgcctcaaatcaagcaaaaacacgatagtaaaagaaaccaaataggagtataggtaataaatattcaacaaatagtactaacagatctaagcttcaatttttatgggcagcaaggctctggtctagttgctgtggaagtgtggatctatactattaaagatttattagccagggttttaactgaggacaaatatagaaacaacacagatacttgatgaaataactcatgcatcacaagatttcatacactgaagcagagatataaaaaagttagaactgcacccgcagtggtccttatatgattcagttaacccttttcagcatcagaactcgagatgttcaactctagaatattttacctcaactacagtagatcatggagtagaaacaaaaaaataattatagtaccattgtgcggacacattctgcaagcatcatcttgaaaccattgtacatttctggacagtaatgttgtttctgcacagccatcctgtaagcacaactagaatagtagaggaacaaatgatgagctgcaactttaagtaacacatggataatagtaaagatatgcacatcgtcttgaagccatagaagcatactcatagtagttcatgtattcgttcacggtaggccttgtactggtgcactccaaaatcttcgagcattttacaatcccctgttccaggactttccagccctcctcgaagcttaggtggttgttcattttgctaccttgttctgacacagctgcactagttaaaaatgtatcagaagtgtttttttttagattcagcaataacagaagaaatgaagcaaatattagatcttttcagtgtttacaagtcgtccgactaa

SEQ ID NO: 444 - DNA, 1101 bp, Zea mays
  source 1..1101: mol_type = unassigned DNA
tactgctgttaaagcaacagctgatttatatctgctactagttggtggtatctaatagtttgcccttcagatttacaggcagtctggtgataagcaattggcaaaacaagcatttgatcgagctcgaagcattgatccatcgttggccttgccatgggctggaatgtcggcggaaaattatcatcaatctgggtacccctcacccctcgattcatggaaaagttttctatgctgtgctctgaaaaattagttactcaagctgttttttctatttcgtgtgattttaaaggagcagtcctgtaaatgaatcttttgaaagctgcttgagggctgtgcagatcctacctgtaagtgcatttttttaatatcaataatctattcgcttgttagtataacaattttctgttttttcttctccgagctagccctgacttcattctgttatgttattgcattagctgccagagttccagattggtcttggaacaattgcagcccgttctagtaatcttctgtcacctcaggtatatttccagttttgtattcgtggttgagacttttaggtggcaatggtgtatccaactctatggcaatttttttagttgaccttcattcttatattctacattatgtaaccgattgacactaagagatacatgatgattcgctaaatcataaagatatttatattgcataatctactacctaaaacctcagtgcctgtgcttaacaaatcattttcttatacttggttccattatgtaggtattgatggctgtaagacaggctgttcaacgagcacctcattatccagagtctcacaatttaaatggcttgatttctgaagtgcgattagatttccggtctgcaatcacattttacttgcaagcgagatttgctttaggcatgatgtacaattccatgtcagataatagacaagcctttgctgatgtttcagtgaatcttgcccgtgcactatgcaaggtaagattgttaacggctattttacatctgctttgatgaagttaaacatattaagcaggtaaaatcatggtgttttggatgatacatctgagattctaatcatcatagtcgttaagg

SEQ ID NO: 445 - DNA, 2215 bp, Zea mays
  source 1..2215: mol_type = unassigned DNA
gcagcgctggagtgtgaagagctgagatgtcaaggtatattgtttttatttcacttgagcaatggaagagttctgttccctaatttggcagatagtattgacagcagaccctttcaaaatattttccacatgcatatataacatataaactaacaagtaattcatcctaattttgttaggactgttgagcgttgatggattgcagatatatgctctggcattgtggaaaattggacaaagcaaggaagctctttctgtatctggaagcttggctgaaaatttaagcggtataaaggtggagagtgccactgcagcttggggattcatatgcaccttgacgtatggaatttctgggaaggactctgcagctgccatgattcagaagcttcctgatcaactcaattacaactcacagttgaaattcattatctctgcattggatgctttgcatccaaccaaacgtctccagctgcctcagttgaatatgcctcctaagcgtacagcttatgaagtgatgagtgaagtacactcgaatattgctcttgggaaggctgtaagcattttaaaatactgttctatatttctatggaaaactagtttattttgaatacatgcttgatgtactaatatatataaaaaatccttttagattggtgtgggatttgacaagcctctgagggttgatggtagtttgtcttacctgaaaaaagtactgcacatgtatcctgactgcagtttagtgaggtgattttcttgctgggaatggtcatatcaggtgttcaaaaggttactaaacttgaggctcgagtcaaaatgttgctcaccattttctcatgatgcagaaaccaacttggatccctgctgctgtggagtggagattggatggcttctcacaaagcaataagggttacctctctgtcacatgggcacacatccagtatgggcctaagatcaccacatcacattcaagcctgtgcaatggtttcttgctatgctacctgctgcacgtacacaaagttctcttttgcaacatgtgaacaccagtacctaagtggacctgatgcaatacaccacctgcaaaggtacatcttctacttgttgcattgacaatgtatgcctttggtaggagagctattcatgctatttttttgccttcaaggtgggttcattgtgaaccatggaaccaagatgcacgctacctgcttgtacttgccattttccaaaaagcacatgaagagaagtaccccaaacatacctgtgttattctgaagaagctcattatgcaagtgttgtccaatattagcaatccacatgagaaagaagctatgcagtatcaggtgttcctgctacttcttctgtcatcagaggtctgtttgcaatctttagactatgaaaactgcatcaccgaagctaaagaagctctaaaactcaccccgtcaagccgtgtggatactttttttgcaaatttgcaactgtgtcgggcctatgtggtgcatggggatcttttgaactccaggaatgagtacatgaaatgcttgagaaaccatacaaatactgagattggctgggtaatgctgaagcaacttgaatctgcatgttctttggagggcttttctgacgaaatagatataaaactgcatgaatgtgttaaaaggaatggcagcgactcatcaaaatggacatcccttttcaatctggcgtgtgctcagtgctttctgtggggtggaaactttgaaagcgctgaaaaagctcttgctcaggcatgtagtcaagtagatccggatagctgcatcttgttccttaatggttagctgctttcttctcacaaagctcatattagttgtcaagggttctctaactcctttgctgtttatggtatgaagcaaaaccgtgaacttggttgttctcttccctccattagaatcctggaataaacttggttgctattggatcaacaaactttctgccagtcttattagattttgatatacattccttgtactggtttttgaatgctactaactattcgctatgctaatagtaaattaaggaaagcatgtgcttagatgttactttgttgataatttattttgtggaattaaattgatccaatctttatcgatgctgtgtgaagaactctgcttctaaattctagacctgtgtttatctgcatggtctgggacacagagtatagtatataataagccttaccaat

SEQ ID NO: 446 - DNA, 514 bp, Zea mays
  source 1..514: mol_type = unassigned DNA
cattttaagacttgcttgggcccggccaaacccatcaacagagagatatctatgctttccattctcaactccttggctgttctagatacagagctagtatagacatattgtaattgtatagcaaaggccacgaatctttaaaaaaaactcaagacattttataatttaaaaccagacaaagctttatgatttaaaacgggaacagtaataaatgtgcacaatgattacggtcatcatcatcatcctaaaacagcagcaacaaatgccactaataccataccaggttacaagcagagtctccaccgacaaacgcaccacccactcatttcattccgagcaaaccaaccaccggacttagccccacatacacaaacaatccacggaggaaaatcaaaacagagcctagcagcagatataacaagagtctgacaaaccgccccaatcatggggccaacagttccatcgccgccacattcatcagtcgctgatagcaggcgacgccgaccttgaccgt

SEQ ID NO: 447 - DNA, 629 bp, Zea mays
  source 1..629: mol_type = unassigned DNA
ggctcctcatcctcctcgcctgctggggacctcttcctcctgtcatcagcatacaacaagctgttactaccattcaacaaagacacccatctgaagcagctactcctgctgtgtatatataatgaattctattttaccatataaaataaaatacacctgtaaagaatgcaaagaatgtgcctgaatatacattaattgtgcaactgtacaagggatgtccaacagcagtattgctcgggaaaaggcacttcacatcaagctttacaaaattactcaaacaaataaaaggcactattccctgatgtcctccacaaagaagtggccacttctcatttcttagtcaaacaaatgtttagtttaacaaccccaaaatgaatgttgcatgttacagatgggatgtttctcaacaaaaataaccactcaataggatgcacaatatcactacttcaaaacataactagactaacccatagacatgtaccaacagtcaaggaacagaacttactcatcacgaccattgtctgcaccacggcgatcatttatatcatcaggagtataggatctcctcctatccctgttattttctttaggctgttttgatgacctcgggtgctcttcctttgcccggg

SEQ ID NO: 448 - DNA, 582 bp, Zea mays
  source 1..582: mol_type = unassigned DNA
taggtaacatcatttcgaggaacgttactgcacttgtacatcatggttggtccattacttattcaaagagactcaaaactcgcagacatactgtgatctaccacgaccacgagggcgtggtgagcgggaacgcgagtatgaacgagaacgggaccgtcctgcacctaaggaaagatagcaacttgtcagttttcaaacaacttacaaaaccatcagttttcaacaacacattttgctaccagaagatgcaaccttcaaacaggcaatttagataaaaaaagatatgatacaatagaattacaaaaaatgccaatcatgaaacttaaatgaacaaaacataagtttttttatcccctcccccactccagataaaacaccaacagttaaaaaagatatgatgcatactcaatcattcatccatgcatctcaaataataggacaaaacaaagcaaataacttagattaccatgacgattcggacgacgcccttcatgaccagaataacctctgcagaggtacaacttcagtcattttaagtgaaatacagatagtgcttccagaaaacaaatgcttatcggcata

SEQ ID NO: 449 - DNA, 1117 bp, Zea mays
  source 1..1117: mol_type = unassigned DNA
ccagcaaacatctggcgattcatgtggtactgtgcctcagaagcgtcataagcatcaacgaactccacgaacccaaatcctcttggctccctgaatgatcacaaaagccttcgtaagtaatatggcactggtaaacaaataagatggcacataacaatcaaaaatagtatgtgcctcacgagttactaccaggctttcatattattatggtgaatcatttatagttctccatagagcatagctaataacttacaaacatgttcatcaaatagtagcaagcctcaaaaagtgattaggagcccttagatccaaaatttcttgtatacatcttcgtaaagtgatttgcttcaatttcttcgagtttgaaaactcatgaaaagttcttgagaccaacttgtcttcattatatattcccatggaagacacggtcaaaccctcttctcttcaggaaattaacaaattgaatcttgtcttgataaaagaacttcattctcacaatactctatctcaccaagcaaatgaacgactaggattgttcagggcttgtatttacttcaaccaaaaatacagtcctgagaataatttgaagagagtaattcgtaccagaagaaagaatcatcatataatgtaaataaatcctatacacaggaaattaattagtgaagttcaacagatggttgtattactagtcttattccacatgttttgccttaagctatcctatgatgttttatattatgcagaaactgcataaaaggaagagaaagggaatggttgagttctttttatgctaatttgctaagctgcgacaatcagtccattttttgactgcaccatcatgaagtatatgtgtgcaatccgtgagcctgtgacagtgtgtagacatccagcaaagtgtacagcccaagcaaagctttcagtcgcatgcaaacatttttagcagtcttaatttcaacatcatggccaaaatataagatccaaaaatgctagctcctaaaaagcagcagaaagcccccaaacactttcgtagaaccccaaatggttagagatgtttatatccaaacatggaaggtgcaaaagcactttgtagtgcagtggcttgtgctcgccacagttc

SEQ ID NO: 450 - DNA, 1458 bp, Zea mays
  source 1..1458: mol_type = unassigned DNA
tgatggatgaagacgcgtattccggacgtagcgagcgcaaggggatgcagtacaccgtacgcatgtacgctcagtgccctacatcctcatactgctcgccatttctccagcgtgatgaatgaccgcagcttcttctactccatcaaatgagcaacgactggctgtttccttggacttgggcaggtgagaatgatggaaaaagtaaaccaaacgccaagaaccatttaacaacaaacccacgagagaagcaagctaaccacatcaggtcaggtggttctgtgcaaggcgaccagaaaagctgaattcagaagaaatccagcttttagctgccaagtttccaatagaatctttactaattatacttttacaacacaagctggaacaacagcgaaagcaacattctggcataggagaaacgcatggcatgatccttttcgaaaatcctcagaagaaggttgtatatgccctcaaaccgtaccgctatgtattgactaggcaacagatgtacaatatgcgacagggaaggaatgcgtacaaaaagagatcgttttctgacattactgcatgcgaacaaaaaacaaacgcaattctagtattctagtaaaaaaaaatcaaacgtctaccacatagcgagttttgtatcatatatgataatgtgttcgaagcaacatgatagcaggctggatcaggattttcgtcagtgcatgaaccctaaattcacgaattttattagcatagcatgaacatatatacagattgatgtttgatgatgatatttattcagaggctcacagagtaaccgatcgagtaattttaggacagacatgttcacatgccaacttggcaacgaagatagcagacaaatcaacattcgtttagctcatgagcattgatgttccagctcaccaaccatccgaccagtgatccggagctacaaatctcatgtgcccagttttttttttttgtgtggcttaattagcttgcgcacagttttatgggatcaggtgggttgggattaaaaaaaagtactacacgtcgctcgttgacactgggacaccaattctctacaatccatctagccatagtttcagtagcaatgtactcgtagagtgtaaatcaccaggagatactcgggcaatctgtatttacacttatcccttgctccaacttttacttcttctacgttacaaaatcacaaaaaactaatcgaggtagctgtgatttccatccaaacaattttttttttgtaaaatatatcctaaaagcaaccccacagtcaactactcaagcaacccatcataacttcacacccaaacaaatttttgtaaatataccagtatgtccatcacctgcggcgcctccggtcggcggcgtactgcgagagcgggacgagctcggaaagcggcgtcgcgagcggcgtggagttgggcgtcgggatgggggaggacctgcagacgg

SEQ ID NO: 451 - DNA, 3417 bp, Zea mays
  source 1..3417: mol_type = unassigned DNA
gctcgacccccaaacccctcttgccctagcgctccccgcccctgcccctcgccgccggcgagatgatccccgtcagtgccgatgtcgctgcggagctgcgcctcctgtttgaatgcgctacggactccaacttcgactccattcggcgcgagatctgccaggtacccatctgtactgctggaccctcccgcttcctgccagcgttacgcccccctccctctcttcgattcttagcttcccagtctggatccgcgggttctagtgcgttctcgccaatgctgcgtcgcctgcattcttgtgagcgcgttcaattcctccctagcttaggatatggtagcgtttaacggtacgattgtcgattctgagtttagatttgttagagttgcaggccacaagttcagcgctagcgacctaggttaacacaagtgggtttttgggacttatggccgcgcttaaactctgtatgaatagttaaggctcattcgcttcactagctgatctatttcatttcctcaatcacagagctcgtggtgactttttcattggcagttttagttcaaattctcgttgaaccacctagtgggtttttggacttatgaccgcgcttaaactctgtatgaatagctaaaactcattccattcactagctgatctatttcatttcctcaatcacagagctcgtggtgacttttcattggcagttttagttcaaattctcgttgaaccacctactgtagtttcgcaaaatagagcagtttacctacttgcttgataaaatgagtttcttctttggcttcgatcatatcttagttctaattactgaatactgagtctgctcgatgttttctaattccaattattttccccaccttttcagttagttgacagtggcctggatggatgcattttggtgctccgagtatgtctgaatcaagtgttgctgaatgctggggaggtcaagaacctccagttgcagttgcaacaaaggcttttatctgatgttttcagatattgtttgcgcaagacatgcttcacaaccagtttttgtgaggtgctgacaacaatagccttgacggatgattttcttgaaagtctgtcaaatctgctggaactctcagttgccgagaaaattggtgttgggcttgcgctctcagattctgagaactcagagataaagcagaaaggtagacatttctctgtgagtctagtgatatcatatccgcttctcttattttcagatgatcattgacattgcctcttgttccagggcaatggttttcaattgctcaaattgaagagctgtgcatgaatcctatccaatctgtatcaaatgatcaaattcatgaaattgtcgtgtttctgcatcagtatgatggcctgttgaagcatctggacactttaaataatgttgtatctctactaaaagtcacagagaggccgttttttgcacctgtcactaatggagattttgatagacaaccaaatctttcaaggtattcagtttctgactaatcaaattctgaatatgtgtacttcttcattcctatttattcacaaatgctccccctctttttttgtgccatgtagacatttggatatgtacttgggtagcacaaatgatgattttgagtcacttctgtctgaaatcgggaaagaaataagcatggctgacattgtagctgagttgggttatggatgtactgttgacaacactcgctgtaaggaaatactttccattgttgagcctcttgatgatgtcgccatatctaagttgcttggggctgttgttggcactcatagtggtcttggagatgcccataacagatatgcaacatttgtatctgctattcttaatagccacacgaacgactcatctcagctgactaaatggaacgcagatgttcttgtggattcaatcaatgaactcgtaagctattgacttcttgcttttttattggatgttcttttttttatcttgcacccttacgctctatctctctttaacacgcaggccccaagtacaaactgggtgcgtgtaatggaatatcttgatcacgagggtttcaatatacctgatgaaacaggcttttacctattgatgtctatatacacgcgtgcttgcaaggtatgtatatataaacatttctattcttggaaaatcaactagctgcttaataaattaattggattatacaggatccatttccacttcatgctgtttgtgggtcattgtggaaaaacagagaaggccagatatcgttcttgaagcatgcagtttctgcttcacctgataaatttacatttgctcattcgtccaggcacttggtaattctgacaacatctggcatcttgataaaattctatccaattcacacctaacagttgtcatatactgtaggaatttcaggatttggcaggtcctagtcaaggcaatcatgcttggtcctgccttgaccttttagaagttttatgccaactagctgaagttgggtacgctacatctgtacgatcaatgcttgagtatccactgggacattgccctgaactcttacttgttggtgttagccatgtcactgtatgtatttctattcccacctaatgggtttgcctctagtttcatgactttaatagtgttaagttccccttatctctttctttttggtgttagctgcatcgacgtatgcatttctggtcccacataatgagtcgcatctatttttatttgtttttagcagtgctataaattccccttgtctctttgcagaccgtgtataatctccttcagtatgaagtactgtcctgcatatttcctgctctactgaaggatccaacaaagcacaatgttatgaattatctctggcatacaaacccatacttcacccttcgaggttttgttgatgctcatagtgatccagattgtttgctaagaactgttgatgtttgtcatgacttgaaggtttgtataagaggaatgcactttattttctgaaattgtatcgtatcaaaacttatccacatgaaagtaactttttttttcatctgtttgttattgggaccatgctacaatattacttcaatgctgtaacactattttctcacaaatttgtttcactcaacttttatttctactttaaacagattctgtcttctgtccttgattctactccatttgcattttctataaaattggctgctgctgccttgaggaaagactatagtcatcttgagaaatggctgactgaaaagttatctttatatggaaaaggtttcgttgaggtaatatgcataatctattcttgtaagctgctacatttcagctgacctgtggacaagttgtcgcggccgcttctatagtgtcacctaaatactagtgactccagcgtaactggactggccacagttaggccgcaaatgtaa

SEQ ID NO: 452 - DNA, 1052 bp, Zea mays
  source 1..1052: mol_type = unassigned DNA
acccgtcgtcgtcgtcggtctggctgcccggccacctcgatgcttagcttatcgtcatcaatgcggaaagcaagcgtgtccactcagtctccgatcctgttaacggttggacgtacgcgtatatcgcgttgttcatgagtcagtagtctctgactgttgatttcatttgttggttacgaacagttgacggcaaaaggcattttttttttgcactcctctgcatatttttttcatacgaagttcgaggtggatttcatccacagcctttatgtgtacaacaggaggcatgcgcgttcgcccgtgcatctggttcacacaagcttcgatcaaacgcgcgtacgtttacacgttgctgaaactgttggcgtacaacagcaacacgtcacgttgttgctggttgcagccgtttatacgagtattagttctgggcactgcgcaaactaaccgaaagaaactgacacgctcgcgttctgaaatttccaacagacagtgctcagtgctcaccttggaatggaagaaatgttcttttttcttttcttttcggatgtgggcttgagcggatgtgctcaccttggaggtttcggttctctgcatttttgctggttcaaacacgcgtgcgtgcgtacgtggaccagtacgtatcagcgtcccgtaattgcttaggcgccactctactacgctacgcccggagatgacgatttcgtaggcagccccctccaaagtcatcttgtaacgaaatccccaaaattaattggggtggcacaccgcattactatactagtactagtactgtagcgtatgtaatggcgcataatatactactactactgtctcccacggggctcacaacacaacgcggctgccgtgcgcgcgaagcttcgcgcagccgggagcgaacacggccgcgcctatatatatgctcgcccctccccggctccggttcgtactgcacgagaacctctttgtccattccagtttccagactcctccagacagcagagcaaccccgaaccgcgcgctgagctgagcgggagcgagtccatcggccgcaa

SEQ ID NO: 453 - DNA, 1202 bp, Zea mays
  source 1..1202: mol_type = unassigned DNA
cgcgacgcccagctgcagctcgtcgccgcccgtggcgccgcagtccagaacgccggctccggctccagctccggctccgcgaccgcgaggcggcgtccctgggagcgagaggccgacgacgacgacgcgtgcgggctcgcggccggtggacatccagaggcccgcgagctcggccaggcgccggggccacgaggacggggaccgcgaccgcgactggagcgccgccgccgcgacgatggtgccgcctcacgtgctggtgtcgcggcggcggcaggaggcgccgtgcgcgctgctgcggccgggcgcgcgcgagctcagccacctgcgcgactccgtgctgcgcgtcaccggcttcatcgaaggctgaccatcgtcccctcctctgtttcgcgcacatgcagtgttcattcaagcaggactcgtcgactagtcgtctcgtcaccattcaccgtttttttttgggtctttgtagttgtatgatcggcggcgttgcctgtttcgttcgttcgttcgttttcctgttggtccatggtcacgatgcacctccacttgtaaagagagatgactgaactcgctacttgcttgatcctccactccacccacctgcattgtgggcggaaaacatgtacgtgttcttcgatctgaaaagtccagtctgaatgtgtagaagggttaaactcgaggaaaacgtgcagattattagcatcctggttcttaatgtataatacaactcatctccacgaggcacgtacaagtttccattcactgccacgggtaaattaaacccgtctgtttgattactgtagctgcgccctaattcacttattccgcgtacacatttctcagcaaggacttggtcacttcgatctataccattccatattgattcaagtttagccaaacaaattcttggcgcaaaatgcgtctaatctaatcacttgagcacgaacaaaacgtgcaatctaagcaggctgacaattctggatactgcaacagtgctagcttcttctttttttcaaaaacacaagattagctgcccttctttgtattaaagagagaaaatatccccacacattacacatctcattcggggaccaaatatgacaagtggtcatgttaaatcacatgatcaccatgaatgaaaaaaaaagactcaaatgaacgtgtataattcaaatgatcaaacagtagtactctgaaca

SEQ ID NO: 454 - DNA, 1292 bp, Zea mays
  source 1..1292: mol_type = unassigned DNA
aattcataaaacatattcacgttcttgcttctatagcacaaatgtttgcatctagatctttcactctttttgttgtagtttacatatgtttcatcaggttttgtttctgtttgccaaatgccggcgagatgtgatccatcgtttcagttttataagcacgaatttgtacttcttgcatggcagactagacattaattagtcttctctagtgtaccctatagtaataatgagcgtataacattagctataaatagcgttagagtacttccggtagtactattccggtcaccattggcactactccagacctaagtagagttaggatctaccttgacagcatcatatttgtcatgttaagctctacatgtctcaacacttctcatgcccaaactgatgaaaaggtacagtgcaaaaggagccaacagcacattattggtggtgattaaaggtgtcagcagaaagccagcagcacattggtggtgtagagcagcagaagtatagtagaatgagttcaccctttccattgtatttatacacctcgagaaggtgctcaaagacagacagacagacccttgactggaggagtgatacattcattttgctgaagaaatgtggttatggcgcctgaccttatgtcgtcagtgccagggccctacactagtacactcctactgcaattttaatttcacccataaatttatattttccccatacatatctcaataccaaacatgaataatctgggatagagatgtatggagaaaaacaaacttatattctataatgaaaaacaaacttatacctttagtactttaaaacaccaatttcctgtgtggtacgttttctcttaacgagctattacactacagataggttctaaaatgagaagtgtgattttcaacgtatttgtccatgaatttcgaaagttacattattccatccactcttttcgtgtgcagcataacgacattgtgctacaatgtttacgacctgctaaataacaataatagcataaatagttgattatgttagtcgtccagctaatcaagtcggtgaccccgccgctacaaactgcatgcagaagcagcgatacttcacgatgcttcctaatctaagttgataatggatacaaaacatgtggtttagacaaatattgcacaaaggagtggcctctgctagtgctagcagtgctattggggttttattgtgaggcaccgatgccttttttttgtgagaatggtacaaaccagagtattgactacattgatgttgtcgacctacctgtcatttag

SEQ ID NO: 455 - DNA, 509 bp, Zea mays
  source 1..509: mol_type = unassigned DNA
taagacaccgatagactcattgatttgtttattagatttccaacaagctgcacaccaagagtaaggaatcagcacaccaagagtttatccgacccaaaactttacaataaccagaataagcattgattcatgcatttcatcaaacacttggtggacgatgtgctacaactttcctttccaatcaaaccctaggatctttctctccaccataattgcacacatatacacataacatcacataagcattgataggatcttttttttttttttgagacacttgaatggtacaaaccagataatagactacattaatgttgtcgacctacctatttgttacttatcctagtcgacacaatgaccactgacaaaataaaataaatgacgacatcctcaagtacatgagtaaaatgagcaacaatacaaacaaacacggtacaggagaaatcactaaacatgaaaacatactacataacaacagccgtccgattagtttctacggcccagattag

SEQ ID NO: 456 - DNA, 597 bp, Zea mays
  source 1..597: mol_type = unassigned DNA
aaattccgatggccccgagacatccctgccccgatccaaccgaggccatcggattggcatccagcggtcacattttaatacgacgaaatgctacgcgccgcatgatctcagtcgttcatcacttttcctacggcgctggttccatcacctacctctcgtatcgaacacggaagcgcgagcagtccgcgtggcagagctcgccgatgagcgacgtgcatgacgccgatcaggccgaagccgaaccctatggatgactcgctctacgcgtcaaggactcacaagcgcgaaagagacgtgtcacacgtcggggtcggtccacgatgtggagcggaggtgcggcgggggcgagaggtgctcgggctgatccgcgagcttgatacttcacacacacgaaccacgcacgctgccgaacgcccaccacccaaccttggccaccaatgaacggtgtaggcaggcatggggcaccggcggtggacggcagacttctttctcggtcacaggaagggatggctggctcaacaggggcgaggatgcatgtgtcggtactttacttatgccccggccgtggctaggatctcggagcgcctccacgttcaa

SEQ ID NO: 457 - DNA, 3078 bp, Zea mays
  source 1..3078: mol_type = unassigned DNA
gtgcgcgctcgtacagtcgtactcgtacgtctcgcctgcggcctgcccccgaaccactcggccgctgaacccgccgccatggacacggtctgcgcgggggttttcactgttcaccttttcacctgccctcccatggccatggctatgattgcactgcgcgtcgggcccatcgattgacacacccaaaaccgccttcacttgccgggaccaatgaatgcacagcgttaactcgttctgcctttggtcccgcggcgaagataagtttggggcaaaaaaaaaaaaagatagagcagtaacctgtaacaaggactccagtacgtacggcttttagagttttcgttagtaccaatcaccatctgtttctcacttcgtctcggctggaacgcgacgagcagagagccgaaccgagcaagcagaagcagacggttgctcaggatctctgaaacgacaaagccaaccccgagtccctgacacgagaccatgacccctgaaacaccggcctcagaccatgtgccgcgtgccggacgagcatgggctccgttcgacctcgaccggcccatgcgcgtgcgggcatgtccccagggcaaccatgatgcgcgtccccgtctcaatccagcacgtgagcacgcgtgtcgtgtgattattttgacctgcctttctggcacgatcttggtttcattccaagcaatctgacaaaaagttcagtgattcgggcaaagtatctttgcatacgatcataggccactgccatgctgttgggagatacagtacgagcaatggagatgccctgttgatcttcctttagccctttttattttagacgaactcctctttaaccttttggggatgctgatattgggaaggacaggaagaagcattagcctattgtggtagtaggtacatgaaaatatagtgggggcaaagcggcatgaggagggaatcagatttgggtggcagtggaggaatattttttatcaaatacggatgtttcactttatagattgtcaccagagttgaaggataaagggtgacactgacatttttttcttaatctgtcctttggtaactttaagggtatatataacactagaatctgaacagcagacagtgggaagtgctacaaaacacatgcaggtcctgttcgaaatgcatgaattcagtaagaaactgaatgcacaaggcttcaacttgtatggaactacctcgttctatatttctactgaattttcggaaggcttcactgtgtttggccaaattcatgcacctcgcagtttagatttcgcaatgaatgtcaactggtaacagaagcttctgtccctagaggcctagacttcgccaactggaatgtactgatcattaagtgtcgagttgttttgccatagactagcgccaagacagtaactcttcagcgacaaatgatcaaatggtgcttcttgatttactctttatctcttcgtttcccgaactgcagctgaaagcctggggctgactcacctcagtgcgtacctgaactcgatcggaagcaacttcacacagggagccaactttgcaacagctggttcatcgatcagaagacagaatacatcgctgttcctctctggtttcagccccatttccttggacgtgcagttctgggagtttgaacaattcatcaacagaagccaactcgtctacaacaacaaaggtgacaacagaaaccccccaaaccatctccatcagtatttttatgttttatcccgtcaagattttattcagtaacacttactcttctacatgtaggcggtatctacagggagatcctaccaagggcggagtacttctcccaggcactttacaccttcgacatcggtcaaaacgacatcacctcaagctactttgttaacaataccaccgaagaagtcgaagccataatccctgatctgatggagaggctcacatctgtaatccaggtgctctttggcagagcaagcatcaagttgctgttgctctttggaagatgttaccacacacaacgttccatggatggtctgctcatttagctgaatacatgcaaatttgcagagcgtgtactcgcgtggaggaaggtacttctggatacacaacacagggccgctcggctgcctgccctacgcgctgctgcaccgccctgacctcgccatcccagcggacggcaccggctgctccgtcacctacaacaaggtcgcgcagctattcaacctcaggctcaaggagactgtggcgagcctccggaagacgcaccctgacgccgcgttcacctacgtcgacgtctacaccgccaagtacaagctcatcagccaggccaataagctcggtaaggcgttcatgttggtgttgtttctaaattctaatgctggctggctctgaacgtttcctcgcgcggaaggagctcatgtttgtattgtttgtggtgcaggcttcgacgaccctctgctgacatgctgcgggtacggcggcggccggtacaacttagacctgagcgtcggctgcggcgggaagaagcaggtgaacgggacgtcggtggtggtggggaagtcgtgcgaaaacccctccaagagggtgagctgggacggcgtgcacttcaccgaggctgccaacaagttcgtgttcgaccagatcgtcgccggcgcgctctcggacccgcccgtggcgctcaggcaggcgtgccatagcagagggcaatgaatcggccccgtgtcgctcgccgcgatggccacgctgcagctgcagctgcagctgtttctggctgtgtaactttgcaagtgtaaatcgaaggagcaagcatgctcgaggacgaggtgcacggcttcactttgtaataagggacatgcaaatcagagatccaagagcaatgatttccatcaatagaggatcgatgaccacgaaacaatagcttacgttgtgaaggattgaaatatcgatcatcacaggcgccaatttgtaccgatacagagaatgagcaaacgaaatattttagacaggcatcgccaagaatgggaggtgggtagaaagcttcttggtattcttaggacccgttcgcttgtatagaaataaatcgaa

SEQ ID NO: 458 - DNA, 2529 bp, Zea mays
  source 1..2529: mol_type = unassigned DNA
cgacaacttgtccacaagccggcgctggagcaaaatgacttctataaccaagctaagcagggtttctaataaaaccaccagcaacaagcttcacgttaccgaaaccactagcagggtttgattatttttttctctcaaaaccaagcagggtttggaatggtctgtgtaagcatgataagttgataggaaatgctgcgacggagattcagacacaaggtactgctcgtaacgaaattcttacctttctgaagaatgaatactccagacggatccaacccatccatatctccttcttggtcagtccagcacttgaaccttttcaagctcccaaaaaagtctatcagatgctcgaaaaaatttacagcgaccaatagggtataaacaaccataatgagtgggtagattttgttgaaggttctcccgaagaaaggcacgacgtcatcaatgtttcccattctctacatattagtataagaggtgatcagtcaagcagtcaacaactgggacatatcttgtaattgttaagattaaaaatgaaagaaaataacattctgcacttgcaatgaaaaaacgtgtcctctaaacattctttttagagaacttctatcttctgttggtatctttacggttgacctactgacttggagtaagggctgtattttaagtatttccttatacacaattaaggagatgaacttaattattttagagcactgattatatgaaagagcataaattttaataggggcctgtatttggcatgaaaactgtaaacttgcaatcaattagtgttttcctacttctctttcctggtgtgcacaaagatcatggtatttttttcctaaatatcaaaaaaaaatcatcattttccccctgagcaacccaacatcgattatgaaagtttgagatcaagaatgactactcaaatatcacatattgattttattcattgccaataatgtagtgaaaaaagtacaagcaaggaacatgcaaagaataccttttcaaaagtagttttagcattaccaccaaggtgaatgagattcaggaagttgtaagaaataggtggtgcatatcttgcaaccattctgcagtgaaacgtttgatgtaaaaattggattagaatgcaggaaggtgcctttaacgattaatgccattcaaagtatcaaaagatggaattctggatcgcttacgagcagatcataagcaagctgactgaactagtttgtcctggggtcaacgaatataacagcatcatccctatcctaatcagtgaatagtatgtgcagatgcacatatacatcaagggaacaaacgcagcaacctgttaataggcaagtctaatcagcaaaaggaataaggttaaacttattgttttggaaaaaattctttaatgaaattataccaagcagaaagaacaacagtatttataaaataaaaagaatggcaaggaaccacaatgtttgatcctctaccaaaaaaaacagattttgatgacccaccaggattttttttcacatgtgaaagcacaacagttgtgtatatcacgattgacgaataaaattgagaaacaaaggattaacaaaatctcatgcaaaagttatgtttatagaaacgtgtgtgggtgaaagtgagttccatgtgtatattttactccaaactaaaagccaatgataacaaggaaagctgcagcaactgagtggcaaatttcttacctggactaaaacttcttgctttcctgcatttataagattggagaaaagtgacagatcaacatcacttggcagcaaagtggcctcagccaacagtatggaagccgagacacatccaaggataacagcaagtactctcataaattgctttctcagtaaacagcgccaaatgaactctgaaaatgtcaatgtgcctttgaatcagtaccatgaattattgaaaattcagggtggtttgctcagaaccctatatgcattggatatgatacatgagtgttgtgtataacgtatcttcagcataaggtttactgtaaaattaggagtcatgaactaatctgaaattattgactatcagtacaacttgtagattcttgcaagacaccttcagctgttacgttatattgatagacacataagtttttattggagaaaattacctatagagtcaagaaaagaacccagtgtgcctgatcgactttccctgaaacttgacagatatttcctgtaaaagttaataatgaaatatccatgagatgcttgaaacagacctctcagaatatttcttctgacgataataagttgttaaccagcttgcaagacttggtgactgagacagttcggacaaaacataatgcacatatgctctcaccacaacagcagacatgccctttatcttttttcgaaagaatgtttaagaaacataaaaattggttatgctactaatgctagtttatactttgtattcatcaattatctgtcgattaaattaaacctaaaatcattatttcttctaacaacaaaaatgacaaataacccc

SEQ ID NO: 459 - DNA, 526 bp, Zea mays
  source 1..526: mol_type = unassigned DNA
tactgtcatgattgggaagtagtcgcgaggtgtgttaaagtataggttgcagtataattcatatgaagaatgcattagtgggcatgtgccgagtataattgtattggtgctacatagatggatttaatagttcaaatgcttagccgataggttctgtcaatcttgtaggtgttaagtttgtttatttggggaaatggtgtcttgcctaatagttttcacatatgccgtgtctatagaattggttgatgttatagactttggaataggagtttggatgttttgttgtttgatctttatgctagacccggttaagctgaaagaatgtaattgtcaagattgcagttttgcagggatccatgcttttgctaatgtgttatccattggatctaggaatattgttatgtatatgatagcttggagtggtatgtaatttagtccggtcacgtggtctagaaagttgatgtgcttatgttcttgttttagatttaaatttcttagaccaatgagtttaaaattattaagtttt

SEQ ID NO: 460 - DNA, 1919 bp, Zea mays
  source 1..1919: mol_type = unassigned DNA
ctccatttttactttcataaaaactctacatctttgtcattgattttctatgcgttaaaaaaataaacatttctatgatttacagaaaaacataatactcgttaaactatgaaaggatcatgatagatacgtctaattgatgcctgctatatcctaaggttggacagtcttcaccaaaatcattagttgcatgaaatgacctcaaataccggccttcatagctgcaagaaagaacaaaaaaagttcatgaatcaaaaaacaatgcatagacattagaaggtgtttatctaatatgagaaggtaatcattaagtagaatttagtgtgttctcttcgaaaagaatttggcatataatatttatactcacaaagaaaatgtgttttcctcataagaagcaccaaacctgcaaaatagaagtgaagcaaccgtttctttgcttgtccattcttcataaaatgtgattcatcagctacgacaatttggaggaaaatcattaagccacgtcacaatcattatgatggtttttccctaatggaagcaaatacagtcaaactaagccaaaaattgtctgaaaccaatttgaattgttttagtttttcaggaaacagaaggcgaggtagttacataaaggcaaacaattttaggaaatagcatgatatccgagttcacatatttaaaaatgctattagtagctataaatatgtaaagataaacaatttcaggaaataacatgacatcatgttcacacatttaaaaatggttttagaagctataaatatgcaacatattttccctcactctaatgactatgtcatcgttttctaagaaaatatgtaaacctgaaggatatactcatgtttatccaaatcacccataaaacatgaggtaaatgaaaaggtccagtgaatagtgatggaaacaaaataaaattgcatgtcacgaactacttttggataatgaattacacatggtgagtacatcattagagatggaccaatttgagttcgttgttggtgtcacaatacttacaggatggaagttctgcctattataaacgagcctactgctgcatcgccagtatatggttttgataaaaagaacaatgaaacaattctggttaagactcaagagaattcagtgtatggtgaagcttagagcaaggtaggataaaacacaaggaagaggagaggaaaatacatagttgatttgtatgagaagcacatgatatttaagataacagagaagaaatatatagccgacttccccataacaatttaatcttttgcgaaaatggcaggtcataaatgtggaataaatattccctagattaaccgatgctctaccaatctgaagtaccactatctacgcagtgaggaccgagaagcatttgttgctgccaaatttgaaggatgaaaaagcagcacataacgagtggaattataaaggcatatatcacacaaagtggaggataaaggactaatccatcaatgcatcagaacatgcagttagcatctccattactttccttgcacatgcctaaaacagttgagttgtcctaacaaactgtagtgaaatggtctatcaagtatcaagcaatagcaaaaatgtacaagagaatgagcagatactgcctacattccataatgataaaaacattctgaatagggaaaagtcatacatcccagaacaaaaggaagatagaaaagatgttccccagtgacatcgcatagtagcaaatttcatgctggaaatgagagaaaaatataagcaaaccaattcctttattgcaagcgaatgaaaatagatcatccaccaacgccacatgcagatcaacctctgcctcttcaatttctagatatgcacagttttcacagggttagcgaatcacatcaaggctgacccaattacaatataccgag

SEQ ID NO: 461 - DNA, 544 bp, Zea mays
  source 1..544: mol_type = unassigned DNA
acgattttttctggctagctgtgtctactgggcgcggcttaaatagggagacgagaggaggttacgtgaggaatccatacgatttttgaacgattttttattcgtacgttgtcaagttctttttagataactccattacaacaacatatctgatctctttcttaaggattagttagatctgatcgtttgaacagcagatttaatctaaaacatatctgttgtagagtggaatagtagatcgtttaagcattagttagatctaatcgtttcctcgtgtgtatgtacacatgctgccgtccgtatacttttttccctcgtgatgacatatacatccggtgcaggaacgcggcgcatccgaatccaatcacatatattggtggtacgacaggtatctgtaattttacacttcggaggtatagagttaaaattccgaatattcttaaatctaaaaatgaaaaaagaaaaaacctcaaggttttgatcccctatctctctagcggcagtataaatggtagtggtagtgtaaagtattcttttatactgt

SEQ ID NO: 462 - DNA, 809 bp, Zea mays
  source 1..809: mol_type = unassigned DNA
agtttagtcctcatctatgtagttaatttctaattaatactcgtgattgacatcaacattggctaaactttagataggggaaccctattgtaggaaaaatattgtgcagcccgaatgcaaattagaatatgtatggttttagatttgaaggttccatcatcaaaaaattcagaatacacattcagaaccacatttctcttttattagaaactcctccaatatctttcaatctatccttaaccgaacgagcacccagtgagaaatggatgttatggaaagcttttccagtccaataatgttttattcgctatttgtagtcagaagttgacactgaaagagactggagtatcctcttctatctgtaagcatgggaaggcgaacatgttcaccattgtcaaccgtggaaacaaacctctgggttttagagaggtgaagacaacaccgctctcacaaggtggcaaggccaagctaattcgcctccgtccaccccatggctcgggcaatcttggagcgaatccggcgaactcgtgcccgctcacgccgctgggattcctggagcgtgcggccaccgtcttcagcgactgcccctccgtcgtctatcacgacacggtcttcacctggttccagacacatcggcgatgcctccgcctcgcctcggcgctcgtctccctcggcatcacccgtggcgacgttgtaagcctcgattaattccgcaaattgctcaccgtacccctctcatccctgccggcgcgggaaaatcaataagtctgatttggttaaatcaaatttcttggcatttttaggtgtcc

SEQ ID NO: 463 - DNA, 861 bp, Zea mays
  source 1..861: mol_type = unassigned DNA
ctcgacgacaacgcggcgaccaaggcggcgatacgcgaggacgggtggttctacacgggggacgtcggcgtgatgcatccggatggttaccttgagatccgcgaccgttccaaggacgtgatcatcaacgccggcgagaacatcagcagcgtggaggtcgagtcggtgctttacagtcatccggcggtgaacgaggcagccgtggtggcgcggccagatgagttacgaggcgagacgccgtgcgcgttcgtcagcgtcaaggactacgcggcgggcacggtgaccgcggccgacatcactgcatggtgccgggagcgcatgccgcagtacatggtgcccagaacggttgtcttccacaccgagcttcccaagacctccaccggcaagatccagaagtacgtgcttcggaacctcgccatggagatgggacccgcccgcaaggccgacggggcgacggccaacggtagcaggaggcagcagcaataagatgtagtggtttgttggggatttaaccacgcacaaatgcattccttgtcgtttccgagttgattaataacctttttttttgtctacttgatagtatatgtttccaagacgatgtttataaggaaaaacaaaataagtgaacatatcagttcattttaggacctaaagtaaagtcaaaagcgaataaaaaatgattcactttacaagatgtgaggtgaagtcaaaagtgagtggagcactggacgcgaaacctcactgacaaagatcatgtgccgagaagaaccttagaacatgtatctacaataaaataactgaatcacccttatataaataaataattgtatgtaaataaaatccctgtcgtttcgaagttaa

SEQ ID NO: 464 - DNA, 1535 bp, Zea mays
  source 1..1535: mol_type = unassigned DNA
tgcggatgccatcacggcatcgctactactggcctcttcattcaactgttgctttccgtatagggactcaagcttaggacatcctatcacatccatcctcttgagaacaggggaggaattgaatacctctgctagacattgacacccctcaatcagcagagactctagatggggcaaaagctggctccttcctgaagttgcctggtcaggaccattcgccgttgcgtatccaattaggttattgcacccggcaatccgtagcctccgcaaagaaatcaaactttggaatgctttctccggccagtagacaagatcatcacatccggtaatttccagatcttgcagctgcccaaagcaaacccaccacagtgctagtgcacgtggttggaagaacaaaatgcagctccatagttgcatacttaccacagacggaggctggtcccatctctccttaccatcctccagcttgacaccctccaaaaacaaagtggacaatgaagtcacacatttgatccctccaagagagatttgttcatttgattcacgcaagaccagttctttgagcttcggtgcccaaggtagagttgttaactttgggcatttcctgataacaacaacctcaaccacaggaaatagtgcatgtccttcaatttcaggggcagcctcccatctctcaaagatacacaaatcttccaatatgagcctcttcagttctggaaatgctgagcgggccactgtataatctccactgcaatatgcttctcccagcaccgatgcatctggtagagctactagatttccacaacccttaatgttcaatttctcaagccgaggaaatgctactgcacctccatccactgcctcacaaattccttcaaaaacgtcaagaccaactagcttaagatccttaagctttccaaatgtagacgatgtacagctgctacacaagaaccgcaaatttcccaatcttttcaaatgaaggagttgcagttctgctagctgacacagtggtggaagctgctctgctttcctacaattggacaaccgaagctcgaccatgtttttcaacatacccaaccaagacggaaaactggtgcctttgtagtaatatatttctagggccagcaatccatcatgagtttcaaggctctctagcacctcatgacactgttgttcctcctccttaccacttgtccattctagtgacagctgtctcaattccttcttattctcaaggctggctgcttttgcatttcttctccctggcacattttcgagcttctttagtattaacgaacctccaatatttaaatcctttagctctgcaagactactacaactcaagccacttcccactacgaaccatgtaattgttcgaagcgaggtgatttgtccaagctctggaggcatgcactccaacctcgtgcacccatctgtgtacagatgacgaagggcactcatgtgcttcattctcttaggaagtctaataagattgaaacatccagaaagtttaagtgtctgaagattataaagga

SEQ ID NO: 465 - DNA, 2806 bp, Zea mays
  source 1..2806: mol_type = unassigned DNA
gtggtatctaggcaacacccaggatcagcaagcatccagcctgctgccctctctctatccttctctctcttggatacctacggtatcgtggtgtcgttacccgacgacaacatcttagttcaatggtccatgtccagttcaaatatacatacagtaaaacaacctcgcatccaaataatgataattaaactaacgcagtctttaaatgtgccttgcatgctcatcttgcaaaatccttgagcatctatatagtaacggaaggggtgcaaatacggaacaagaaatttgtattgtaggcaacttacttgcattttatcttgattttcatccaatgccgcagacagagcctcagcagaagcaacacgaacattgtaatttttatgggaaagtgcattgaaaatatcagagtaatcggtgatgacatcaaaaccaaagcggtcccataactcctctgctaattcagcaaccacctagagaaggtacatgagccaaagaacaagaaaataaatataatttcttgctctagaaagaaaaaagttcaacatatttcactaacataaaaaaaagatcaatagttccaagttcaaagggatgttacaaaccttctcaggatcatgagcagcaatccaaaggctcgttgacacatgcaaatctcgttgcacagagtgcacaggaacacattttatagcagttaagcaggcaagcctaacgtgcacttcttttgcatatacaccaataaaagcctgaagaaagaaagaggtaagaatacatagcactagatgaaataaaatagaacaaaataagctgaagaacagaatacaaaataacaacctgcgctaactcatggcttcttagacctaggcatagctcattcagcataggcccaactgaaggatgataagcaggaacagtgcttagcacatgataaagaacctagccatagaaaaattaagatagtaaattctagaactaggagtctatgagaacaaaacaaggaacatcattaagtctgaaagaactaagaatgtttaactgataacatcctaggacgaggaagtggtagtattggatccatatgcaaagatagtacgtggagcacatcatcatgaagacacgtcttttttgaagatagaaggatcctttccatgatctgaaccaaatggtagcagcataaataaataaataaaaggacaaaaacaggttaaagtaaatgttggaagggaaatatcaaaaggaatagaaagtgaatttatggttggactaaagacagtggacaccataccggaaagacaaaagtaaacgaatctgctggaagaggacctgctttgcacgcaatagtcagaccatttactatttgttcaaagaggccagatgatggcttcttgctatcatcttccatgatcacaggggtaagatccaaaacgatttcaagatcaccaacagatatcacacgaattgcagcagcaatctcgggtgcccaattgcaaagaggaggggctgtgcaacgagctagcctcaacaatgtacaaaatgcagcatcgcttactattgcagaacttagcaaaggttcaacataatttacctgcatagcacaacatcaaattctgagccacaacagatatgataaatataaatgtagaaaatgcatcactactaatagcagtgtctcatgccaaaaaatgataacaagaggatataagaacctaaaaggtttctccaagatatgttccatttcactgataaccaaatacaaatttcactattttttgactggatatatgagggtcaattattacatacttgattatcatgatttggctgttcgtaaaagatactggtgcggaaacaaaataacatattggtgcatttattaagacataaatcataaacatttccaaaaacaaaaaaatgtaaacctcgctgcagacacaaaagaaaaggtcattttttgttcaaattaattcttatcgattattcgatttttttgggtagctttctaggtttaaaaaacgatcttaattaaacaagatatagccaatgtgttcaatatttactcctagatgtgcacattactccctctatctaacacccttcaatgttgtgatgaagttctgccaagcatggtctatgggctggcaacatagtaacagctaacagtaaaaactgaaagaaactacagagggaaggaaaagattgctaaccagagatggcagttgaccatgagtaaatataggattagcaatagccaattcgccaagagcatccaacattaaggagagattcttctgcacttgcccaaccttcatacgtacagatgcttcctccttcaagagcaactctctggcctcctctttagcagtcttagccttgtctataggagctggaaatattagaaaataaattttcaccaagcaacacactatgcacctattgtcagggctaagaggtcgaagtaccagtcttctttgtagatttcccagcttctcgcttgccagtgcctgaagattctctcttctcattctttgcaggaacaacagaccgagctgtctcctacaaattatagcaacaacaaaatttggcatatacaatagattaaagccatattcactggctatcaaataataatactagattgcacatttggtagattttctttctggcaaagacttagaagctacaagttcatcacaaactacaatcaaaatatttaaaaaaaacaacttgcaagaacaaaatattactgcatcttgatcatcatatgcacggaaacgcccctttgcaagtttagagtttttggaagcaacag

SEQ ID NO: 466 - DNA, 805 bp, Zea mays
  source 1..805: mol_type = unassigned DNA
ctagaaaccacgacaggaacattggtatagtatataatgaagtgcatctataattttttaagaagttttaacaacctttagtagtttgattgcacatctcgaagagcttgattgcacaacagtttgatccatatcagggctatcaccttgcaatttcatccgcagttacctggtattataggtgaaaatcagtaagactgcaaagatatgatgaaattattaattgatcctttgcatcaaagtaaatgacaatttagtaagaatcgaagtgttaatttttacatgagagggatacgtgaaggcaaagggatgtaatcaaagcttgtgaacatgtgccttgctaatgcaaatcaatgtgtccatgaaggatgcatattatatatcttgcatgctaataattctgctaatgcagatctacgacatgaaacaattgtctgcgacgacatgaaacatttgtctgatgagcaatgtatgtaggagtttttttgtatgcaagccttcctaaaagtcgaaaactacaaaacatataaattttccacattgtcattttgccaaacacatcgcagcctagcggcgtgcgcctggggcctagttacctgaccagaacgcttcaattcagcattccagccaacaactaatcgagatgcattggtgcgtgagaatagcagatgacttgcagtggaggacgaagagtaggttgttgttcagttgttgggcatgtactcgtagaccaacagcttctcatcgtggaggacaaaggactttttggtgcttagtgatggtttcatgtcatggaacgtgagag

SEQ ID NO: 467 - DNA, 3920 bp, Zea mays
  source 1..3920: mol_type = unassigned DNA
aaataatacaattatgaactgggcacagaacagtgtaagcaaaattctactgaagcacacagatgacagatctacataagttattgcaaaatagaacagagtactaatcaggcagcaactttgaaggcaaaggaactaacagtaagcattgaaacttctagattatcctaagcttatgtcaaaaaaatgtgatcctaccaaaatactgccccaatttggaacaaataatgtctataaagcatacgcataccttaaatagaatatacagcataatatcaacaaacaaaaaagcaagtttcaaagaaatgatcatggctgtcaattagcactcgggttaattaaactgttgagcatatatcttcttcaatatttggtaagctgatccaaacttatttccatcaacaagtttttgcagcatgttgtgaatgattgtccaaaccacaggatgtcagaaaagcaacaaaaatcagtccaaattaattccagttatagcttaaatttgcacctcttattcgtagattctttgaagcgcccgagcatttgtatcatggaatcaacgcttatttgtccagagaacatgtgttgaaaatatgcattagcctctacttcaatgtcatctgaccctccctctgaattagtaagttctctcacaacagagctaggtttcctcgattcatacagagcacacaatttctttatttcatccagtattacatctgacaagagctgccccgagtgagattgaagaacctgaaaatgtgcatgacatgaatccatacttgtccccccccccaaaaaaaaatccaaaacagcaaaactgaaaaaaataataaccatgaccatacagacctttatgaagacacaacaagactcccaatataagtttttgacaatagattgaggttgtgacatgccctctaagacattatcagtgttgctcatagttgctttcaggaaatcaacacattcctgagtgtaggcgagttgagttaggaaagacaaaccttataatcaagcattgaaataaacgggtagtttgctaccagaattgaacaacatgatggatgtgggaagaggtcagctgaaatgtagcagcttacaagaatagattatgcatattacctcaacgaaaccttttccatataaagataacttttcagtcagccatttctcaagatgactatagtctttcctcaaggcagcagcagccaattttatagaaaatgcaaatggagtagaatcaaggacagaagacagaatctgtttaaagtagaaataaaagttgagtgaaacaaatttgtgagaaaatagtgttacagcattgaagtaatattgtagcatggtcccaataacaaacagatgaaaaaaaaagttactttcatgtggataagttttgatacgatacaatttcagaaaataaagtgcattcctcttatacaaaccttcaagtcatgacaaacatcaacagttcttagcaaacaatctggatcactatgagcatcaacaaaacctcgaagggtgaagtatgggtttgtatgccagagataattcataacattgtgctttgttggatccttcagtagagcaggaaatatgcaggacagtacttcatactgaaggagattatacacggtctgcaaagagacaaggggaatttatagcactgctaaaaacaaataaaaatagatgcgactcattatgtgggaccagaaatgcatacgtcgatgcagctaacaccaaaaagaaagagataaggggaacttaacactattaaagtcatgaaactagaggcaaacccattaggtgggaatagaaatacatacagtgacatggctaacaccaacaagtaagagttcagggcaatgtcccagtggatactcaagcattgatcgtacagatgtagcgtacccaacttcagctagttggcataaaacttctaaaaggtcaaggcaggaccaagcatgattgccttgactaggacctgccaaatcctgaaattcctacagtatatgacaactgttaggtgtgaattggatagaattttatcaagatgccagatgttgtcagaattaccaagtgcctggacgaatgagcaaatgtaaatttatcaggtgaagcagaaactgcatgcttcaagaacgatatctggccttctctgtttttccacaatgacccacaaacagcatgaagtggaaatggatcctgtataatccaattaatttattaagcagctagttgattttccaagaatagaaatgtttatatatacataccttgcaagcacgcgtgtatatagacatcaataggtaaaagcctgtttcatcaggtatattgaaaccctcgtgatcaagatattccattacacgcacccagtttgtacttggggcctgcgtgttaaagagagatagagcgtaagggtgcaagataaaaaaaagaacatccaataaaaaagcaagaagtcaatagcttacgagttcattgattgaatccacaagaacatctgcgttccatttagtcagctgagatgagtcgttcgtgtggctattaagaatagcagatacaaatgttgcatatctgttatgggcatctccaagaccactatgagtgccaacaacagccccaagcaacttagatatggcgacatcatcaagaggctcaacaatggaaagtatttccttacagcgagtgttgtcaacagtacatccataacccaactcagctacaatgtcagccatgcttatttctttcccgatttcagacagaagtgactcaaaatcatcatttgtgctacccaagtacatatccaaatgtctacatggcacaaaaaaagagggggagcatttgtgaataaataggaatgaagaagtacacatattcagaatttgattagtcagaaactgaataccttgaaagatttggttgtctatcaaaatctccattagtgacaggtgcaaaaaacggcctctctgtgacttttagtagagatacaacattatttaaagtgtccagatgcttcaacaggccatcatactgatgcagaaacacgacaatttcatgaatttgatcatttgatacagattggataggattcatgcacagctcttcaatttgagcaattgaaaaccattgccctggaacaagaggcaatgtcaatgatcatctgaaaataagagaagcggatatgatatcactagactcacagagaaatgtctacctttctgctttatctctgagttctcagaatctgagagcgcaagcccaacaccaattttctcggcaactgagagttccagcagatttgacagactttcaagaaaatcatccgtcaaggctattgttgtcagcacctcacaaaaactggttgtgaagcatgtcttgcgcaaacaatatctgaaaacatcagataaaagcctttgttgcaactgcaactggaggttcttgacctccccagcattcagcaacacttgattcagacatactcggagcaccaaaatgcatccatccaggccactgtcaactaactgaaaaggtggggaaaataattggaattagaaaacatcgagcagactcagtattcagtaattagaactaagatatgatcgaagccaaagaagaaactcattttatcaagcaagtaggtaaactgctctattttgcgaaactacagtaggtggttcaacgagaatttgaactaaaactgccaatgaaaaagtcaccacgagctctgtgattgaggaaatgaaatagatcagctagtgaagcgaatgagccttaactattcatacagagtttaagcgcggccataagtcccaaaaacccacttgtgttaacctaggtcgctagcgctgaacttgtggcctgcaactctaacaaatctaaactcagaatcgacaatcgtaccgttaaacgctaccatatcc

SEQ ID NO: 468 - DNA, 543 bp, Zea mays
  source 1..543: mol_type = unassigned DNA
gtgtgattacatttgcggcctaactgtggccagtccagttacgctggagtcactagtatttaggtgacactatagaagcggccgcgacaacttgtccacgaccacatggttgcaaacaattaataaaagtagattcccgtacttcacaggaaggaaagtctaaaacaattctgttgtgggatctttctaaaatatgcttcttgtatatgctatctgcatcatttatgtcaagatgctaaaaaagttgaaacagaggttaggtaaatttgcaatagaggttaaaaaattaacaattattctagttttacctcttacaagaagacttctcatgcagcactgcaaattgtctgaagcagctatcttcccagctaatcaactaaaaaggacatcaagggggtgcagtcagtttctttggactacacttccgcatcacctcatagaacaataatagaatagtacttacatcaacatcctccagcaacatcactttcttctgtgcctctgctgccctttccttttcctccgcagccagctgaaagggac

SEQ ID NO: 469 - DNA, 1274 bp, Zea mays
  source 1..1274: mol_type = unassigned DNA
ttgcaacaatcagatgcagtcaaaatgtcttaaaggttccttttcgtaccctttttgtcctcttactgattttcttaattggttttgcactcaaaaggttatcgaccattgcctccgtatacaggttaattctgcaacattgtgtccaagctgttcctttgaatacagtccatgaaaacaacctgtgaaccaacgattcttcacttagtcactttcctacccaacatgagaaaaacaattactttaaggaattatggatatgctctgcattatcctggtacttactagaaacataaggacacatccattcatatgccccggattcttcttaaagtcagtgcaagagctttctttaatgaatgaaatatcacatatgaccagtcaacctttttcaacttttctaggtcatatacagcttgaagttcaggtgaggttacataaaaatagacttttgtggcagtagcaggttatttaagaccacactgaaaaaatgtctgacgagcatatctgtgtccatgtgcatggagatctcctcgttatccgaatgttgagccaactttacaatgttagtcacggtgaaataggttctcttaacactagcaggtacttcatcgttccgttgaccagcaccaccttcattggtctgttgtccagcaggtacttcattggtctgttgaccagcaccaccttcattggtctgttgactagcaccacctttatttttctgtctcagaggaaacttttcagatactattttcagcacttcgtacattttgacatattgttcatctgctgaagcttttgaagatggacttgggagaaccttctcagagcaggccaagaacttgttggattttcagttgtgggctgcaccgggtttgcagctccttgtcatgctcggcatatttggaaacagagtgcctgcagatgttgctaaaaagaaaattaatcaaaatttcagaaatctacagcttctttgatatgattttgatatttagctttaactgttttatcacaaagaagactatcaactaatgtaattgaaacaaccgcaaaagttgtctaagtggccttgtcggactttgctgcggctgaggcagcctgttcgctgagacgaccagtcctcctgagacttgaaaacggagccggcttccttacgctgggcgcgtatgacgcgacccatctggtcaacggcggcggcggcgggagaggacgcgaagggaagaaaccagagaataactgagtgcgtccacaggaataactaaggtattaga

SEQ ID NO: 470 - DNA, 610 bp, Zea mays
  source 1..610: mol_type = unassigned DNA
ataacggagtgggcatattataataactgaggtattataatggaggcaacatgaataaagcggaggaagcatggatgaaacatgcaccaggaggcaacatatacaaaaaaagggcaaacattatacaggaggaattgaggaaacatgtagggaactccgaggaaacatctaccagaggaggcaacatgtacataactggaggaaccgaaaaacatatacctggaggcaacatgtataaataaggggaaaatatgtaggaaataggagtgtgctagttatgtaggaaataggagttgaacaaagagcaatacgcagaacaaaacgaacagcatgcatgccgaccgcatccagcagatgctcaaactcgggcgcatatcaacatacagaagcattccaaaaggcaacaagctcaagtaggaaatatgaaaaaagtctgatcatgataaatgttgcggagtgtaactcagaattcctgacgtagtcaaacaagtacagctttatctagatacaataggtgtgagtaggggtaatggttggggatatgaggcctgagtggcaattcacagcaggtgtgttctctagagatgagctcatgcctggctttggaact

SEQ ID NO: 471 - DNA, 747 bp, Zea mays
  source 1..747: mol_type = unassigned DNA
agtttatgtttgttgatgcatgtgagtgttatgaagatgcacatggatcatagcacgaattggtgatgctgaccccttgcggcgtgctcaaagttgaaatgtttgatggtattttgcatgttatttttcactttctttataacttttcagttggtaaatttgatatacatatgcaaataaccgatgttagatatatatagatacaatatagcttgtttctttatatagggtactaggtatttgcacgatgtagctgttgttgacacctaattgcactatttacttgccaaatcaagcttagtgcctcattggttacaattatgcacttgtagccatttgtcagccaccctacaaatatacaaataggtcagatttgatgtattttctatttctaataagcttctatgatgtatgaccttgcaataagaattttagtgccatgatgataggatcagcaagacagtttctaagccaatctgaaacacttgacagtttcacagggatgtgtcaaccatgcccacatttcttgtttatttgttttggaaccaaacttaaatctgaacatttttgttgtgagcaataagaatttcagtgccaagattttgtagacaaaattataaaaatttgttgcttgaataaactaaagaattgaaggaggaaattgttgtttgtgtctgtgttgcaggtgatggggagtcaaaaaggaaggaggagtacatgtgcttcctagagcaccactgcacctga

SEQ ID NO: 472 - DNA, 507 bp, Zea mays
  source 1..507: mol_type = unassigned DNA
cttactgtagctactgcatcatgaataagaaaattctatctatgcaaaccttgggaagatcaagactaaatggagtatcatttgtcaacttttagctcattgctactgaaacaggagctgaatttgggctattaattttgtgtttgtatttgtaatctattttgcagtcttgattatgtctatttcatattctaatctggaggatgttggaggtccttaggtttgtgaatgaaccttatatattttataaacctttttatcaagcttatttcgataataaatgaagcacacatctttgatgatgaatttgcaccggcctctgatggttccttgtgataatgtgaagctttgctcattttctagagttagggtgtgagttttcgcattattaaaataaagataacattttcgtctagctgaaatagttttgtatttcatatgtactttaattaaatatatttctactgaaactacgcagtgaagttgtttgacgatagacttaattga

SEQ ID NO: 473 - DNA, 1251 bp, Zea mays
  source 1..1251: mol_type = unassigned DNA
aattgtctgcattctatagtagcacattctgcagcacatgcacatagggtgctggacagggtaaattcactcatctgtgtcccttcttggtgcatctttgaaaaaagcttcagagcctgtaaaccatctccattgcaggtatacccagcaatcatggtattccatgagactatgcttctgaaagacattgagtcaaaaacatggcgagcgcaatcattcctaccacattttgtatacaagttgatgagaatattgcatgtgacagtatcagttaccaaacccaaatggatggctaaaccatggcagcctttcccaaccaagagggacctcttctgtgtacactgttgcaaaagttcatgtagcgtaaacatgtcaatcaaattcctgtcaaacctaataaggcttctatcctttagggcaattccattgtttagcttgttacaaaaagaacgagcaccaaaatgaattccggagagtacagcaataagagaacaggcacactgttttatagattgatggttaaaccaaatgcccatccaagcaaggcagctgccccaaactctctcagttttacttttaggcaaacttcacaaagtgggatttgtacttacaaaaaggaagtggaatttgcttgacgctaagagcagaaaaaattctctgcagactgaactgtgaatgtttcagcatgtttgtccaccttcagaaaatcagaaacttttgcattgcatcgctgaaagaaatagcaagttaatacaagtagcaaccttgtgatactcattcacatatcttctgctatcaaatttacatcccgtcataaaaggaatgcaagtttaaaataaatcaaaatgagaaaatacaccggatttcactaaaatctgtacaaatggttgaaaatgaaaaaaaacatttgaaaaaataaatcaggagctaaactaatggagctgcaggtttaacacctttgcgagctgaatttagcatagcacttatattgtgacactgaacactagtactccagtcataatagcctcatttttcatgtccattttcagtcttgcagaatttgtttactgaatagaattgttagataaccataaaatcagaggggctagggcacgaccatttggaatgacagaacaacagtaccgaaggattaaacaattcagtgctttgctaacagtaatattcttattttccagatgagctcaccctgaatcaggatggcgttaaacagcgttccacaaaacacaagtt

SEQ ID NO: 474 - DNA, 763 bp, Zea mays; identical to SEQ ID NO: 423
  source 1..763: mol_type = unassigned DNA

SEQ ID NO: 475 - DNA, 1244 bp, Zea mays
  source 1..1244: mol_type = unassigned DNA
tttagtagtaaactagtaacagatccatatttccccaaaaacaatctccaatttgattaaatatatacagaaactattaatatatatgatcttcagaaaaaataatacattagtcgtcaaatgttttttatgacaaacatagtggaagatattatcttatgcaatcctatgaagatttagaatgttttgactccttgggaaacgagacttccattctttcctggatggagaaaatatttgggtgtgggttatcagatcacctaaaattttagatccagtaatttagtttttttcaaaaaaataggtccttaaattgatagctacagtttgtcttaaaaataaacaatgaaaaaaatacagtatatatatttcaaaactaccgagttctaccaatattcaattgaaaataaacataaatgccaggtgccataaagtacaagtatacattatatatattaacggttaatatatacatttagagtttattggtggtgagaaattgtttcattaacaaaccaaactctaccataatattttctgtaagttattactttgtatacaccttggcataccaaaattggaacccaactgtgagaactccattttttataaaacagtgccgttatacatatgattcttggatagaagataattcaacattttaagtgttgcggtgtagattgaaactattgtcatgtcactgtaatatcaatgaatataatgtatggtacggtctagaatctattttaacaaaatatagttgacatttttaatagaatatataataagaagcaaagtctaaatttaatgtgtggatgaaaaatatgacattcacttagaattagaaattgagattcactaaatatagatttgtaatgtctcaaaaagatgtagcaagggttgatataactccggataaggttttagcaaagtacatattaaaaatcactgaatgtatgacgaaatcatataaagtatataaaaattgttgtgttagatagaacaatcaattttgagtagctatgaggtataaatttatccacatagtgttcagatggtgcaatgcatgtaatagtgtaagcacatgattgctacccacttcactataaattgttgacccatcaatggtggtttttaatttagaaatataaaaatgacgtaaggttctaaaaaatcaacggtgaggactcaggccacgaatatccccagcggagtcgccaaatagtgttgtggtgccgatctgg

SEQ ID NO: 476 - DNA, 703 bp, Zea mays
  source 1..703: mol_type = unassigned DNA
ttgaacgtggaggcgctccgagatcctagccacggccggggcataagtaaagtaccgacacatgcatcctcgcccctgttgagccagccatcccttcctgtgaccgagaaagaagtctgccgtccaccgccggtgccccatgcctgcctacaccgttcattggtggccaaggttgggtggtgggcgttcggcagcgtgcgtggttcgtgtgtgtgaagtatcaagctcgcggatcagcccgagcacctctcgcccccgccgtacctccgctccacatcgtggaccgaccccgacgtgtgacacgtctctttcgcgcttgtgagtccttgacgcgtagagcgagtcatccatagggttcggcttcggcctgatcggcgtcatgcacgtcgctcatcggcgagctctgccacgcggactgctcgcgcttccgtgttcgatacgagaggtaggtgatggaaccagcgccgtaggaaaagtgatgaacgactgagatcatgcggcgcgtagcatttcgtcgtattaaaatgtgaccgctggatgccaatccgatggcctcggttggatcggggcagggatgtctcggggccatcggaattttaatccaaaacaatggctgcacccgcgtaacgattcatgacccacgtccatctaatctgggccgtagaaactaatcggacggctgttgttatgtagtatgttttca

SEQ ID NO: 477 - DNA, 1564 bp, Zea mays
  source 1..1564: mol_type = unassigned DNA
tgctagcgcgacacactaggtgcatgttcgttagatgcatatagctatagtgtacagtgtactagtgcttgtattatatatgtgtatttttttttaatctcacagattcatgattgaccgttgattattctacatagggttcaaaagtcaaaaaatttgtcctaaactcttaccttacatcagcaccaagtgattaaaaagctacaataagaggatgttgagtgttgccattcattttcttttggcactggtagttctgtcgactaggattactaaatgacaggtaggtcgacaacatcaatgtagtcaatactctggtttgtaccattctcacaaaaaaaaggcatcggtgcctcacaataaaaccccaatagcactgctagcactagcagaggccactcctttgtgcaatatttgtctaaaccacatgttttgtatccattatcaacttagattaggaagcatcgtgaagtatcgctgcttctgcatgcagtttgtagcggcggggtcaccgacttgattagctggacgactaacataatcaactatttatgctattattgttatttagcaggtcgtaaacattgtagcacaatgtcgttatgctgcacacgaaaagagtggatggaataatgtaactttcgaaattcatggacaaatacgttgaaaatcacacttctcattttagaacctatctgtagtgtaatagctcgttaagagaaaacgtaccacacaggaaattggtgttttaaagtactaaaggtataagtttgtttttcattatagaatataagtttgtttttctccatacatctctatcccagattattcatgtttggtattgagatatgtatggggaaaatataaatttatgggtgaaattaaaattgcagtaggagtgtactagtgtagggccctggcactgacgacataaggtcaggcgccataaccacatttcttcagcaaaatgaatgtatcactcctccagtcaagggtctgtctgtctgtctttgagcaccttctcgaggtgtataaatacaatggaaagggtgaactcattctactatacttctgctgctctacaccaccaatgtgctgctggctttctgctgacacctttaatcaccaccaataatgtgctgttggctccttttgcactgtaccttttcatcagtttgggcatgagaagtgttgagacatgtagagcttaacatgacaaatatgatgctgtcaaggtagatcctaactctacttaggtctggagtagtgccaatggtgaccggaatagtactaccggaagtactctaacgctatttatagctaatgttatacgctcattattactatagggtacactagagaagactaattaatgtctagtctgccatgcaagaagtacaaattcgtgcttataaaactgaaacgatggatcacatctcgccggcatttggcaaacagaaacaaaacctgatgaaacatatgtaaactacaacaaaaagagtgaaagatctagatgcaaacatttgtgctatagaagcaagaacgtgaatatgttttatgaatt

SEQ ID NO: 478 - DNA, 559 bp, Zea mays
  source 1..559: mol_type = unassigned DNA
caaattatgcatccaaaacttacaatttcgaatggaaggagtagcagttaagcaattctacgtagtaatagtagttagtttaagcaacagcagcgctttaaatacagatactaattgctaacctgaagacgtgaatttgtaacatcaacatgatcttcaaggtcatcctgcaaccaaagataaagaagttatcatcgagtgcagaagacacaaatactactggttttgttaggtggcactaactatcaatcttgtgtgcagggtaagttcttcattgactgctaatgcaatatgcttcgtgctcagcactgtctcttccagcttctcgagaccctcatcttgctctgtaacatgttgatacacgactcaaataaataaagcactatgaaatggtccttgctcccacaactgtcatttccaaggaactagatatgtaccaaccaaatatatgaaatgcaaatggtgtgaaaaaacagtgctacatgacctcatgcaaacagttgaatgcacccttttagtaaggtccatggagcaaacactactgaacaaaccacaataa

SEQ ID NO: 479 - DNA, 1561 bp, Zea mays
  source 1..1561: mol_type = unassigned DNA
ggcattttactttgaccaagcagatcctccctaaattggaaaaacaagggtaaatattcacacattagttctaacaaaaaaacataataatacttacctaaaaacttgaatacagtaaattaatgtgtttaaaaaatatattaagatttaggaaggatgagttcctatagagatcattgctgacacgacagacctgttagcgaagtttgacatgttgaaacttgtcgccatctgcttggctttagacttcaaactggaaagcatgtcttggcgtttatgcatctccttgtcagtgctgcacaagtcaaaagaagtcaatttcaagcaaaaatgtttgatggtacgcaaaaaaaaaacagagtaaatgtctggacatcaaagtatgaaattctttgtcaaggaataatatctttcattgctacacaaatccttctcataatgaattttctctcaacttaaacgtacaaaacatgtatctagtgaaatgatgtccacaccgtcctagtaatctgcagaacaaagggaaccaatgaaccatattttcgtttgtaagcaggaaaccatttactagtacaaccagcaaattactcttttcaagtaatatattatgggctgttaggatcagtgccccagcaggaagccaggaacacaagttttggccctgcccatgcaatttggctgggctgcaatgctgatgcatcagctggagagtggcccaagaagtgccacacattttgtaacaatctttggaattgtattttctaaactatgtgcccaatatgtgatccatttacaccaattacgtacttgtgatttaatgtaaacaaagacacatgatggataattcgatttatgtcgaaattctaaaaatcactgacatgtgggccccacatgagaatcactgttttagaataatttgctgtggttgcaaccaagtccaatcttggctttgttacaaaccgaacgctgtatttataactcaaatttggtattatcctaactttggccatggccaatatttgggttaggcctcctaggatttagggtctacaagaaaacaaaccactggacgatctattctggaacaacgtaaaattgtgcacaacacataaaccagataactcaatttttagtacagtgcctgtcatagccagatccataacatttcatcacctaaggtacggagtttatctttattgattcacttattcatggcatagttcagtgctcactcattcgaataccacttttcatccctagatctagtatcagccattgttaagaccataaccattcatttacagccgcatgcagctcaattttgagtgcaagaacacgtcaaatatagtattgacaaaacagatcattggtttaaataagttcttcagattcaatagctatatgtttcattgctaagtatcagacttgagaaaaacaaataaggcatcattgcaagcactccacccatcattagtatcaaagttgtgaaagtagttgcaacacgacatacattgactttggaggaattctgccaaacaatgactccaagctatccagtcta

SEQ ID NO: 480 - DNA, 511 bp, Zea mays
  source 1..511: mol_type = unassigned DNA
ggtgagccagtgtgattacatttgcggcctaactgtggccagtccagttacgctggagtcactagtatttaggtgacactatagaagcggccgcgacaacttgtccacgatccgagggtcttccagccgatcttgggctaacattcgaaaggttaaaggcaaatgacatcaagttaaaccccaaaaagtggggctgaaaagggaaggcgccagacagctagccaggcttctcaaaaaactttttacgtccattacgttcttcgcatccttctaacgtgtgtggctacactaatatctttcccgttttgtctcctagattaacataggtcctcgaaagagctgaaggaaacaaaaacaaacctgggcacccttcagaatgcccctgctcgaggaaccaaacaaacattgatcaaacactgaggtcttccatcctggtaagatctcaaacatgttcaattccttacacagggaccaaaaaactcacaataggattgtcatgaactctagagtt

SEQ ID NO: 481 - DNA, 536 bp, Zea mays
  source 1..536: mol_type = unassigned DNA
catctaaaaatatataatcgagatgtgatcttatgtgaaaactcacacaagtagacgcagcatgcatgaccataacgattaaataatatataactatcgatgcttgaaccaaatcagttttataaaatcttggtcttacaaatgcatctatatatacacgagaccccacatatctcaaactacataaaaatattgtaatagaccaaacgacctaatctacgagaaagtatatcgtaataacaaaaccttaatattgctatcgtaataacaaaaactaaatcttgctaaaactattcattgtcctaaatcttactatcgtaataaaaaaaacctaaatcttgcttaaacccttcattgtcctaaatcttgctatcgtacgtagtaacaaaacctaaatcttgctatcgtaataacaaaacctaataaataaatcttgcttaaactctccattgtggatccttatccattatggccccctgcagctggtcgccggtggacgaagtggtggggtggcgcgctttatccgtctccattgt

SEQ ID NO: 482 - DNA, 725 bp, Zea mays
  source 1..725: mol_type = unassigned DNA
agtttgcagatgtactcccgcgcgggtgccggcgagtcgacgacgacgaccgccccagacgaggcgccgcggtggtcgctgatcgtgtcgtcagactcggacgaaggcgtgggcgacggaagcggcgcgccgacctggcccatggcgaccaataccatcttcctgccggtgaacgtgctgcggatgtgcgtactcgccccctgcgcctcgctcgcagaacgtcgaggcggtgtgctctgctggggcttgcggttgtgggcgtaggtttaaataggtgagggatgagagttgttgcgtgcgcgaaattacgcgggaactggactccgatccccgcagcggcagcaacagactcgagtccgttcgctggactaccaggcgagataatatctggttacttctttcaatagacgcacgcagcaacagactccatattactgcctacctttctagacggatcagcttgaacgtgatatggatccgatctggctacgcctacgatacagacgctgctaataaattttattttctcctaataaattttatggcaaaaataacattttacttcgatgcaacaaaatcaatcgattttctgagatatctatatggctcgtagtccccttatctggcagttaaaactatttttccgtagtttcttcgtcttgtcaatgctaggctatcataacatatttcaaatcggactttgatcgatttcttcaaactctttc

SEQ ID NO: 483 - DNA, 3405 bp, Zea mays
  source 1..3405: mol_type = unassigned DNA
ttagactattatgtgacgggcctaaaacccagcacaagaggccaattagggttagactacgtaacataagttcactgcagtgctatatgcatctctctctcctttcattttgtcatttgaaacaaagaaccttgagtttttttcagccatactaccagagctcatgagaacaattttctttgcttgaagaataggccgtaacaaaattttaaactgaatgtgatagatttaaacttccaagaaagtttgaggtcagtgaaattgatgaaggtgatttttgtactaaccttcctcatcaaatataacttgattaataataatgttgtgcgaatcaatctcaaactttgctaactcttgcaccaatctctctgtttcatacaatgaaagaaattccgggatacaaacacatacaaaagttgtcaaatcctaggaagaaaataaaaatggaagttagaaggggataccataaacattaggtgcctaaagaatgtagatatgcaaagtaaagataacgaagattagaaattatcagataatccagcatgtttggtcagttcgtgtttacccagcggtgctcatgtacttaaattggacacgtgcagaggctatctgttgtgatgttaaaaactgctctgtaaagtaactatgcaaactgtaagttgagcatgtagtgtgagtcaagtctacaatctatacttttggttttaagcaagaaacacaatcaactcgaatcttaagaggactaatgcttttttagttccaagtttcactatcatgaatttcccatgtgtggtctcgctatatcctttaaccagtgacattttttaacgccgagtaccatagcatgatctgttactagtagattaaaacgcaattctgcttccatacaaggtagggagtcttactggatctttaaattgcctgttcacttgttcgatcacgtccttcataccctcaagtctcccaagcattgcatcctcgttcagctcatcgccaagaccaaacaatcgactggcctgccaaatgcattcattattatattagctatacatgtgagtttccatctgggtaggtccaatgtataatctgcacatgcaaaagttcaccatgtacatattaccatctgacctcatcacctcagtatgaacaaagatatgtcatcaagtcaatatttttctttgctttgctttttgtccaaggagaactcataatatgattgtatttgcaatactggaacatcagaactttctttgggataagcttggcgattcaggctctgttgagcatatcacaaaatatctctatcatttatttggttataatttagagaagatgcagcctagtaccctgaagtaattgcctaattgatatcaatagtgttttatttagagaagcaaataacatattagacacataccctagcaacttctccaaaaaatggttttccagtatattaaaatgtatataaaatacctgattcaacagaccaccaaatctatttttcaactccatcattttctcaagacccttctctaaagttgctgggaactgaagcaaccgcaatgtatgccctgtaggagcagtatcaaaaactacaacagagtaatccattgtttggactaatctgcagtgaggaaaatataatattcaaaaagttgctgaaagccaagaaatgcaaggaagtaccattttcaggataacaatggtaatcaaaatctaactctcttgacatattggagacattgaacaatgaacaagggaattagaaagggtagcgagtgaaatatgaaatagatggtaacaaaagtagctggccatattgggaagcatggcaaacaactgaacggagcaaaaccttactttagcatttcagcaaaactcatagcttcatctactcctggaatcgcatttgtcagttctgaaaggaatccctccattccttcattggctaaatcatcattttctaccttcgggtcaatttcctgcagataaagttacggaatgagattattcagccaaaataccagctgtaataacatgaaccgagccatttttcgaaaacaaataatcaaactaaggaaatagcagattactcttaaaaaatagaactcatagggcaacaaatgaaacatgttttgctatgtatatcatttgtgagaatacaaagaaatgactaaataggttcatatcagtaccatgcttgtcatggatgaaaatacaaagaaaaggaggcaaatgctgaatctcgtgcttagtcaatggtcatacatttttttaatatccaagtggaacatgttctaagtgaaattgcaatggaatgggtattctataaggcaaccacctaatatgttatcaacatcttcctagaataaagaaaaaaataccaataaagattgggtacttcttttgtacaggtctgctacctattcttaaacttccataatcgactcaagaaataatgcagaaatcacagacatatcattcacagagcataatcaccacttggtatggttcacgaagatgcaggccccatctctgagcaataatcctgtgaccaacatgccacaaagtacaaacacaaacccaaaccgaccccgaattgataactttgcatctcgtatagcctggccttaggtaagttcctatgacttccacacgtggaaaattatgggccacatgcgacttctctctctgcatactgcctgtctcctcagacaaccctgctaaccccctcacaaaaattcggtgaggctacaatccaatccaatcaccattcgccagaacacgcagcctgcccatccaatcctcacaagcaccacctcattgggtggggcaagtgaagacgacccggcgagaagtgtggattggagacgtaagaaagagaatataatggaggaattttgctttctgtgtgtgtgtgcgcgcgcgcgcgtttaccatggcgtagaggttggtgaatccgcggacgagggtgggaaacttggtgaaccgctgctggaaggcatcgctgaggttgtgcgcggggtcggtggagatgactagcacggactggcggacccccgcgaggaggacggaaaggatggagctgcaggtggtcttgcctacgccgcccttgccgccgacgaagacccacttgagggactcctggtctaggaggttccgcaccgtgggctccggcgcgtcgccggcgtccaccgccgccgcagacgccatgctccgatacccgcgcggtgatcggggtgggcgataggacttaggaggcaatgagatctggcggagtggaggctggagaggaagcgaacggcggtggtgcctcactggcggcagatgcggtactggaattgtctacgtggaaaatacctttcctcctttggacgttttcaactttagtacggttagtggtac

SEQ ID NO: 484 - DNA, 1993 bp, Zea mays
  source 1..1993: mol_type = unassigned DNA
tagcccacgttaaaaaagctaaaatagcaaatttttcgacgacgatgggctcctcgagcccatggccacgactagcattgctactcgtgacagtcgcatatatgaggaagagactaccaaaatctagactctaggctaactttaacaaggtgacgacgttcgacggtaaatgtaaaaaggtaaggatctttgatatcagcaaaccatgcaagagtactgtcggagagaaaaaaatattaaattctctgagaaataagtgaaaagtaaatttgttgcagggaaagatacaatgtttgatgggctacagtaaaaatatgttgaacaatagaaaatacagtggcagtatgtctaaactacggaaaaagagtacatagttataaatgtttttttcatgaaactaaatactactttgtagtatagttataaatgtttttttcatgaaactaaatactactttgtagttgaagtacagaagagagaaaccatacctctataagttggtagccaaataattgtagccccgcagaaattgttgctattaaaacaatttttagaaatgtataagtgactttatgtagcagcacccatatcgagtagtagcaacagctcgaatgaaaataaactatatgtcagatgtatagaggacccatggtggactgccatctcgaaaccatacaaaaaattcttatgatgccaacagagaacaaatattgatagcaagagaaacgatggaagtcaatttaagataactataaacctttctccatgatcataaattgaatgttgtttaaaaatgatatttgagatctttgggaactcatctccatgttcctgtttatgctatctctgaatgaaatgttcttactcctaatgaaaataacattatagaactaaaatggccaaaagagcgatggaagtcatctttaagataattataaacctatctccatgatcataaattgaaagttgttataaaatgatacttgagatctttgggaactcatctccatgttcatgtttgtgctatctctgaatgaaatgttcttactcctaatgaaacaacgttctagaactaaaatggccaaaagaggtgtcgaagatcataagtgtataattatcagtataaacctatctccatgatcataaattgaatgttgtaaaaaaatgatacttaagatatttgggaactgatctccatggtcatgtttatgctatctctaaatgaattgttattactcctaacgaaaacaacattctagaattggaacggccaaaagagttgtcgaataccataagcctataattatcatgaacatttatataccaaattgtcactttcaggaagacatttacaatgaaaataatctggtttctgatttggatataacttttttgtattcaagcgtaagagaagaaggcagtacatatgtaagtcatcaactgaaagtgctgttctttacggagaatcattgttataatgaggaaatcagggaaactacatgagtgccaaaaaaacatgacaatactcatattgtttaccaaataaatgagtagactatccatatgatgtaatcatatatggggtccaaaccaaaaggaaatatagaatcatacgcggtttacaacattacaattgtaaaccgaataagtgttgttatttacgaagaatcgttgttgtaaacagaatttaggaaaactacatgtgtgccaaaaagaaagataacagtactcatatcgtttaccaaataagatgactatccataaaataagtagactatccatatgatgtaattatttatgggttgcaaaccaaaagctaatatggaatcatatgcagtttacaacattatgagaacagtgcttcaaaaattaaacaaagactatcggaacccaaaaaaacaaaagaatggtcacctaattcagtaacggaggctgggttgcactaattggattgattgattgtccctacctatgcaaaatggggacatatcca

SEQ ID NO: 485 - DNA, 2006 bp, Zea mays
  source 1..2006: mol_type = unassigned DNA
taacgaaagatttttctagtgaattgggcatacagtggttgcattaccgatgactctctcctccttaatttgcgtccacgtaggatttttctatttaattgctgcttacgtggctgcttagagacagcgtattcaatgccgtcggttttcgttttctttagtccaactctttaataaatgttgctcagctctgatcccttgaaattcagaaacagaaaaagaagcgacatattagtttgaacaaccttgctttgtattcatgcgaacatcctggtagaaggataccaggaaatgaactactagctagttgaattggggatcattaagtaccttctgcagttctgcgcacaccatctgaagtctattttatatcagtgtatataacgttgtttcaggacacctgctaatatcgagcagtgagtactgaaatcctccctggcacctaatacctcgattattttttactatgttcatttttgcatggccaccgtcatctcgattcaaactaggccaacaatttgtgtcaggtagttattttgtacttttctggtcagatcttggctctagtttgtatggttaatttgcactgcattctgctgtagccgactagccgtatggtatacagattacagaagaaccctacaacagatggacctgatatatcaagtatattcaaacacacgaatgcctgactgatgtggctaggatggaagaatccacttttatgttagatggtgatttgagcactcgattggcatttctgcaattacagcaacagttttcacctctctttcatgtgtcagttacttgtttatgtactgtaccgtaggcatcacatgttctgaaaataggagatgggtttaggaagtagtgaggaaagtttaaaattgaaaccagagcacaagatgtttggattaaaaactttgtttttcctttctcttattcagttatttgtcttatcattaagattattacaactgttcagccgcttcgaatttaatagtgtataacaacttaaaaagtggcttcagatctgtacaacacatgtactgatttttttgttgctgtagggtgtctgtgtctcttggaagttatctgcctatttctcattttgtattcaaatcatgcttctagttcatttattgaatttactttgttgcagtgagactgccatcatgcaaagccctatcacagtatctggcacctctgcctccacaaaagcagcccctgatacatgtgggattcaagggtgggctgatctccctggaggcccactccagtctattgttgccctcctgggctccttcattgacctccttgccttcgcaagcacctgtcgttcttggcgtgctgccttctcatcatacccatccaaatccaggttctgtgccttgcttccacctctcctcgttaggcccaatgtctccgtgcgtgcacctgatggtcacgagctacgcagatggcaggtcatcgatctagccaatacaaaagcagacctttgctgccagattcctcaagaaatatgcaaggcgatgcatttcgccggctcctcctatggccagctgatatgcggccttcgcaaagattgcatcattgtcgatgtgttcactggggccagagtatgggcaccgccgctcccactcaacgatgacactttcttctactctggcatgctgacagctcctcttgcgctagaaaactcgcacctccttgtctgtgtggtgtccagccagcacagcatcccagcctcccttcttgactggtcagttggaagcaattcttggtcggaaatacagctcggtaactcactgatcgagcagatcgtggagttcaacggtcagttcatcgtgatggacagctactacaggctctacactctgtccttggccccccggcttggtttgcaggagatggcaactgtttggtgggacaacatgcctggatgcccattccgaaggccatggctgttggtatgcagcggcatgcttctaattgttgactactac

SEQ ID NO: 486 - DNA, 1138 bp, Zea mays
  source 1..1138: mol_type = unassigned DNA
agtgatccgtgcccgtcctgtgttgcagaaatttttgccttggagttgtttggttagggaagacttcttatatttgagtagatgatgtcactatggtattgtatttgagatttcatttgtgtgtgtgtgtgtgtaattgttaagttatgtgtctgttttgaggaaaatattgatgtatgcttttgaaatttatatgaagaaaacccacgatgtctacccaaagatcagtttttgaaccgtgctgtctagattaggtttttcttttggaattctgggattttagatttgtggatggagatgtgtgtgtgactaacgtctacaactacaagaaccagtctatattgtcaaagcgaaaaaagaaggaaccaaaagataattcgtaacggttgacaggcagaacaattcggaactggaatttgacgtgaacagatttatattccatcatagtagcaaagcagtaactgttcgatattcaaacgtggatcactgttttttaaaaattttggtaagaaaatgtgtatagcagctcagaacaaataataagggcaagattccgaaattagaggaagatttcgtgaattttggttaatttggtgtgatgtaaggaggcctgcgttttcttgtgccggcttaggacaatggagcgcccttctgttgcatgggctgacatgatgtggatgctgtgtggaatcgagacaacgattgtaaccttgagttcaagagggactggtacacctagctgcaggtcttctgggtgtatccaagcatgttctatcgctgatggcaagtgattgatgaacttccatctgcttgtgctgaaacttcaccttgaattttcttagagaacataagcttgcattcacaatggatagtggccattatggtagatgagagtttgtagacttgcggtttccattcaattatcagctgtgttatcctttgctacttccaatcttctgtaccattaatgacctatgaacttgctagctattctggaaagcctggaaggatggatactgttacttgaattagtagtagagaaacattcgtaatgtgcctgagttcctctgtccacgtaaaatctgaagatgcaattgcttgtatgtatgcaatctgttcgtttgaatgcaaaataaag

SEQ ID NO: 487 - DNA, 693 bp, Zea mays
  source 1..693: mol_type = unassigned DNA
aacagaacgaaggcaagttacattcgaacgaaagtaaattgcatcacagcaagtaaaccttcaagtgtttttctgtctcacactacaaatattacaattatatcgaatgtttttcacacatcaaatgtatatggaccaaacttggcttcgttataaatttgttcgcggattctccagactatgtcgtctgcagccttctttgcttgtgccgcggccacaacttcggcttggatggcgacgtcttcagcctcggcttcagtatgttttacttcaattatcacctgcgaagtagagacttccaaccaaaatttagaaagggggcccacaatatatgtacaaatgtggtccataaaagaaacaagggaaaaaagcaccttcagcctttttctgctgtagactctttctaatgctagcagcattttcagtcgccttccgaagctgcaaaagaattggtttgaattttttttagaaaaaagaacatacacccttcagaccagtaaaataaaaataataacagaggaaagtagccgtatacaaaccttttcactgttttttattgcttcttcaatactgacttctttgccacccttagaccaaatgtcagataagaattttttgccccattctaaagcctcggtagtcgatcttcgaacactttcagccgagacttcgaagtcaggcttcgagcaagct

SEQ ID NO: 488 - DNA, 549 bp, Zea mays
  source 1..549: mol_type = unassigned DNA
gttgccagcttcagcttcctactctcatcttcaaatttgtctcctgcttctctcagctcagcttcgagcgagctagtgcgcttgtcctttttgacatttgaagctttgaaccctgaagattccctttccaaggcttccttgagcttattcttctcttcagtgagagtctgaacttcagttcgactcttaagaaagtcactctccaaaaccttgaaagattttttttcatcgcttttgttccgaagcctagatacttcagaccttagattcaaaatttctttttgggcagcttcgccattaatatttttcctattctttagagctttactcaaaaacaagccctgcagagttagaaaaaatggtgataatcacgctgcgtaacaaacaagtccgaacagtaaggtaaaacaatgtaaagtatacctttaaatgcgtgtagctgaggcagtcagaaaattcatcgaagggcatcaatgatagcccagcttcaagtttcgggaaaccaatgttatcgccatgtagaggcacacatcggtctcaaaattatct

SEQ ID NO: 489 - DNA, 2841 bp, Zea mays
  source 1..2841: mol_type = unassigned DNA
catatcatgacgacggcgatgacagccacgccgaacacgacggcgagccacctaccgaccggcgtgtcgacggcgacgggcctctggggccggtaccctttggagaggaggtggttgatggagacgtagacgaagatgcccgtggcgaggcccatggagacggcgaagatccagtcggccacccggccctgcgtggtggcgtcgataatgatgccgatgccgacgccgacggggctggagatggcgaacgcgaaggcgtaggcgaagcaggagaggaggggccggttgggcagcatccggagcagcgcgatgcccatggcgatggccgcgaagatcttgtgcaggcttatggtccacagcgccttccatgcgtcggccttggtctctgcaggttcgataattagtagtagttaggtaataaggccagacagagtctcagagagctgctagcgcttagcgatgctctgcagctgttaacctcgaccaagaattggagacgctatgtttacgagaaactcagcctctccgtttaaattgattaattaaaatgggttccgaaatgctaacgaatagcacttgaaatgccttcagaattcaagtgaaatggtaatcttgacattcggaacaagtaaaaaagtatgcattcgaagagaacttgaaggccatatatcaggaagagaaagaacttcagagcgtccggatagacatttaaacctaagatcagaacaagtagaaaagtatgcatggcaacgactggactgaaccgttgcgcggaaaaaaaatatcaggaaaggtcagcaaagaagggttggaatgatgaatgatcagcctattattctggctgtgctgagtctgtaggctcctttcgctctgaccgaacagcgagacactagtgcagctttgacaaaaagagcaggttcagattccacttggtcttagtcacgaccacgacatctgtcactggaatcgagctaagaactaacgtaaccggtgttcagttgagacttcagacttgcaggtatatatgtcatacctacatgccataacatctcatttatacctaaagctgggcatctaatcctctactccgtactcagacgaagctaagttcgtcagtttagcccgtgacatgatggcgacatctgctgataagagtagacccggaatgcacataaaggaatttctacgcgtcatctgcaagttggaagggaacaaaacaacgcatccatatatccctatctctatctggcttagccttaccggcgatcccgatggcgatgccctcgaagacggagtggaagcaaagggctactatgagcagcacgctgtcaccgatcgtgctcgcgttgcgcagaatggatgcggccgagtgatcagatccgtgtgcatcctgcacgccaaagcacaagtaatggtgacaaataagattctgtacactgaccggccggccgtaagatactgctagtgctgttctttttaactgtcttttattgggagtggactgtactatatggttgttgcaagagcaggtattgccatgatcaaataatgaattcagaagctgaagcaggttgtagtaacttacagctggtgtgggctcagacctcgtgccatttgcggttctcatcttgccctcctccagccctattgaaagtgtcaaaaggagaaaatgaatcgtacaagtataataggcttcctaaagctttaatacagagaaaatatgacaatggaaatacagtgctgtagagagggacagacagacttcccctgatgactgactattcagagttgagcatatagactgattacacgcagaactgccagtttgtcacaaataaaactctaactaaatgatccattaagactgattccacgtaaagtttttttttttggtttcgatccactactctaactaaatgatccattaatcaatctcgctacatgttgattggctgaaggaaaataaaactctcaagaacaggattactgcaaactgcaatgaacccgaactttcagtcgccttgtacgtgataatgcaacgtgcaaccagaccaaaagcattggcaacagttggtttaccttaggcagtggtgtactactacagcaatataggattagtagttcgcgacgaaaagagtaaatctatcccaagaggcaagaacacactaacacagacctccaccaatctgaatttgcagcccgtgctagttgcacccacccggcgacaggaaaaagtggtgtgcgcattcaacccaaccccggatcccccagtcgttgtggcggcattcacagtaatcagtacaccgcccagcccaactgcccaaccccaactgttacaagccagaacagaacgaacgggagtcggtactgacacgtgactcttgttactgacctgcatcagaaccgccggtagcggcggtgccggtgctgcgcccctgtgaccgtgagacgacgtaggagatggcgacgtcggcgagcatggtgacgacgtaaccggcgcaggcgagcatgaacgcccaggggtacccgctgtcggggagcaggtccccaaacgtctcgtttgcgtcgctgaggaagtgcatgagcgccgtgccgaggaagacgccgcccgcgaactgcgtgcccagcgcgaggaacgcctcgttccagcgcatgaagtagggggacaccccgcccagcagcgtgccgacgaacaccaccgccaggcaccacagcttggcctccaccaggctccgcgcgcgcaggtccggcctggcggcggcgcccccatccgcgtcggcgtcggcgtcggcgtcggagtccccgcctccgccgtgcgcccacgcggcggccgcgagggag

SEQ ID NO: 490 - DNA, 3501 bp, Zea mays
  source 1..3501: mol_type = unassigned DNA
tacaaaaagaaaaactggatttcataacatcagcgatgagagtatatctagagccgagggaccaagacttgtggctacatctacacgagttgatgttacctgttcattaaagtcgtggaccacaatccatgcatcgatctcactaactcgcgttttctaggggcctcacctcctgtcaacctcaaaactgtcaaaacgatccccgctccgtgactcgatccgttggagattcgagaacagagaggctagcataggttggttggagattggagagcagtagtccggtgcaggacactacggagcccggcacgagcattggatgttcggtggtccggacccacgggccgcggacgaggtcaggtcagtgatcagtgacttcagtttagttaagggaaagagcagtgtgttcatgggccgatagttcagagacaaggctgaatgcttgtccagtccctctgtctcccagcttaggttttggcccatgtgccttacccttactactggtcgaaactacatccggggaaattctatgcagtgtaagggtcatgttttggcagtggcttgtacatgaaaaaggtatccatccatctacttacagttacaggtgtcgtctgcgtcgaacccagaagttcttgacaaagtttctgcatctgtccttgttcatctgtttcattcgtgatgttcccttcatccatctgcgctttacttctctcacatgtgcgtctgtctttgtttcttgtgcggcaaagcagttgcatcgcgacacctgaatggagtttttttaaaaaaaatgtaatcctccttgttagatgccttattcatcagcccctatagctgttcttgccttcggatttgtcttgtggcggagagaatgcagagcatgtgtggggtggtggttcagagctggtatacctgttcgttgttttgtttccttgttaaaaaaaaaactacaccacttctcacttgatttgattgaactcgcgaatctctatgaagcgcgcgcctaccgaaggaatcggcaaaacgacaagccacaggtcgatataaaaaacctgctctcctgctcacattctacagcaacacgttttggatccccaaaatgctgcaatctgtaattgttccaagacatgttcagcctagatttgctcaaatccagaccttggactgttatgtttctacggtcctgcttcaatgtatatactgcattttcatgtaacaaaacagcaatcggtatggcaagaaagtgctagcattccctgtcaacgtactactagtaaagaaaaacttttgtggtaggagaagcatgtgacatgtggttcgttgcatcatgaagcccatgacaatttatgacaacgaagcccggatcgggtggatggcacttcaatggtttttggtggcattttgctttcatctggctaaacggatgtagcaaacgctctccactaggtttccagtaacccttagctaagatggaacagtacagtactgtcccaagcaactcgatctggtccgtgtctagctatgagctatccatttgtctgtctcttcaaagctcgaaaaagcaaccgctccaccacatgatcttggttctactctggattacaagccataccatacattttcagatgacactgtctaataacgatgaactgtataccggagcatacgccactaaaactgccaagtctgatcttgtcccttctaatcatgtctgtttcttcagcattaaccgcacgctctgcacccagagaagcatttcttgctgggacgacatgacaaaatccttgagccactcaaagcacctagctagactagagaggatctatcagcagcacgccctaggtttgacaaacatcgggccaaatctgctgcgatggttcgagtcaatggctgcttaaacattgcagcaaaaggtgtggcttgcaaacttttttcttctcaagaaagtggagctggcttttcctgtccacacggggggaaaacagaagcttttgctactgtatcatcctatggcctctatagcacatgtactttgtcacccacaaccactttccatgggaccaaaactttgggagccacaacccatgatgtgaccttgaaagagcaatcatgggtccaggtcagagatctggcccttttccacacacatacacacacacctatggaaaatgggtctaatcactggagatgagtggcgtataatcggccacaagatatggaggagataatagtctcatgcccggcggagtgctgacggcaaacagtagacgattcggccatgcatccgtgacccaccgctagctagctgctgcatttttgcgagaactaacgttcattgatttcagcagtgatattggcaatatatagagtggcggcggcgggcggtccatgaacagttcccggccacatgtgctgcctctgagccccagcagctcgatcccatgcaggcatgggcgcatccggcgagaagagaagaacccggccgacggatgagcccgtgttattagctaataagttaagaaatgcatggcaaaatccatgctaaattgttctcgtccttgctgccgaacaatggaaatgcttgtacgaatcacatgtttccactctgtactatctctttacgtaccacgggggcacacggggcaacacagatgaccacacagtaacaaactttgcctctaggctctagcacactctcatcacaggactaacgtacgacatgagggcatataagggcaacaagactcctgtgagatgagatccttgccatgcagatcttttttatacgtgcattgcatcttttcccgtgctccttccgccctttgttccttcacatccacaccagcccgcaaaagcaagcctcagctctcccgtgaggcacaagcgcacagcacagccataagctagctattgccccccattggatcgaggtgcagccaaatctaggaagggctcacatgcatggaggaagaaggtgcagtggaagtctgcaagacagtgggcggcgcgcggacaaagccagcctaggcctagctgaaatggactctttcctaggcgatgaaaagattggtggctggtggctcgttatctggtagagtcaatttatatattaggtttgctagaaaattgctcataaactctagccacaagatatgttaaaatagggcttacatgtttggtgctaaacaatgacgacatcattagggcgatcaagctagatcggctcaacgacgacaagctagacggtggtctttccttcgctaaccgagtatgtagagacagaccaagtcttatcataatttatatataggagaagaggttacgataaacgtcggttcacgtgttagccctctccctgttaatatgggttgtgtgaaatggtccgggccaactataaggttgttgtagccctgatgacgatcatgacacgtgagttgagtctggttcggtcaatcttttgaccgaatcggcatattctctccattgatctcttatttactc

SEQ ID NO: 491 - DNA, 1413 bp, Zea mays
  source 1..1413: mol_type = unassigned DNA
cccaccatgccatcaactcaggtctcccacgaaaacgtctacacaaccccgagctgcgggtggtaggcactccccatggggttgcaaagtattaagcatgggtaatttgagttatgcctagatagttgtatttctcttcgattacactgtcaattttttttgtcaagacacatgtgtgatttttatggttggattacttatattttacccaatgtcaactgtcaatttgtccaattacgaagttggatttcaatggaagaccttgtttttcgtctttacaggagtaccctcacgctccaatctcctctagctctgggcgaaattgacaagagtcattgcctaaagcttcatatcgatggaactcacatttttcaatgcctctataatgagtactacggtgttagtgtcggtcgtcgggtcttaagatatctattttatatatgattgaggtcttatatctaccaagtaggatctatactttgcctcttcacttagaaattttagacatctatgtgcatgcttccaagcactgtaatccactattttcgttgtgccagacacttggtgttcctatggacagacttgtgcgagccgtagattcagtttcggtatgttccaattttcagtgcactacatgctcagctacacttgcatgtgaatgggctacactgcttggggttccactgctttcgtacatttcgcgagggagggacacatttggattttgcagttattcatgttgggacgagggaatggctgtgtgtgtgcgacgagtcagaggaggctaaaatatgtaggagtgtcatgcaaaaaataatattgtactaaactactggtgtagtatttggagatacctttcaacatttatagaaggaatgtcatgctatttaaactagattgatggcctagattttatggttaattaattgacaggtttattaaacctaaaagacacacacttcttgctacctaactaatgattgactgtcgccacgcattagaccgaacatcaacgtaaaatgagacacctaatggtagcataaatacttaactgaactaatgtgtagaaataatcggactaatatcttgctcagggactgctccttcctgtgctcgagtctactctgctggtacaagcaaaaacatgttctgttaaggaaggtacgtacacattacaacaatttggtgcatctctgttgctgtttctggagctttatttgacatgcttgccttcttgatttttgaactactcatgaactggactacatactccaacaaggccagtacaagcaatagataaataacttttcattttatccagttgcataatcatttggctatctactcatgaacaggatctgtcagtgcagataaggagtcacaagttgtaaagggtaatttgcatctgaggca

SEQ ID NO: 492 - DNA, 3435 bp, Zea mays
  source 1..3435: mol_type = unassigned DNA
tgtcatgatggtaactcaaatttgtcgcctagctgaactgctgaagcatcatctttgcagttaggtagtattcttttgcgtggcatgcttcatttcgaggatggccagtccaaatctcgctctgaatgtgctggacttttaccctgtattctgtataacacttttgacacaacaccattctgaagtctgataggcattgtggcaggtcttgccattcccatccccctttctctactatgtaaacatttcaatctattttggttttgttttgcttcattgcatcttttgtatctcaataaaaaatgtggtgcttctttggttttttggaaagacattatagcattccgttactgatcaactgatgcatatacgattagagtcactcttcctaggttagatcctatgtgcattttccatttactacattatttgcttcagtttgataaaaatgggcaaacattgtcaggtggctagtcgtatgcacaagtttgatggccatggaaatggaaatcccaacagaaatcaccaagcccatcatagaaatgggcccaggcgacgttttcctgctgctaatggtgcaccaccttaccctccaccaatgcattatccccaacatccagggcaacccattttttaccccgtggttcccagtccaatgatactacaagaatattcttaccagccatttcctatcccagtcccgaatcatgaccggcatgttggaaagtctggttttgagaattccgtgcctccttttgttccagtagatcaagttggtgcccatgaaagtaacaggccaacgcctccacatccaagaggaggtcctcatctttggcggcctcctgttggcactcatggcactaggccccatccttctcctgaaggccatggccattatggacaggcttggcaaaatcctcagatgtttggtactagagaaaacacaaatctaccacaaggtcttgggccaagagcttttgtaagaccaatggtgcctcttggatacatcaatggaccaccatatcctggtaatgctatgctcaccatttatgacatgtttgcagttcagatttctttttagttttcaaatattgataaatgctttaaactcagggcctatccctcccatgtattattacatgcccactgtgcctatggattcgatgagaagtccatcacactacattcaaaatcaaccagctcctaatcctgttttatccccagaagctgctgagttaagatctaatatactaactcaagtggagtactacttcaggtaaattcttattatcttcctttggagtcataacaaagcgtgatgatacctataaacatagatgcgtggatttgtaacaatatgttgatagattctcatttatttttattgggtgctgggtagtggtgccaaatagtttattttaattggatttttgtctattgtcagaaacatgatgttaaaaagttcagtttgatgttgtatcacacttcaaggttgtaatgtcatggtgcaacatgcacacaaataccaatacagcctacaatctgataaaatctcatatgtttcgataacatcaggagcgattaaatgttcttttagcaagtgtggcatgcaatcctttgttcatgcaatcatgtttttcagtgatgcaaatctggagcgtgatgatttcctgaaatctttaatggatgagcatggttgggttccagtttcaaaacttgcagatttcaatagagtatgttttctttccagattgcttaatattaaatttctattattttgcccttgtgctaggaaacaactcatttttttatttgcagcttaagaaaatgaccgcagatatacacctgatattggatgcactgacaagctcaagtcttctagaagttcaggttgcaatgttatttcaatagtcattgttcaaattccatgttctgtttaggtatttggttttaccttatcctctgctggtctactgacaggatgacaagattagaaggcgttatgattggtcaaagtgggtctcgctttctggtacatcagttgcgagcccatcatctgccagtgtgaatagcagtgtgggtgagaagaacattggtggtttttcaaataaggatgcttattctgaagatcaaaagacgcattgtcaatccaaagatattagatgtaatacagatattggtatgggggaaaaagttatcgatgaacaagtgcaagattcacatggttgttcattgaataacgacttttctgtcatcagtattgatgaaaagactaagaacctttctgcacatccttcacgcaaatatggatcttcttttagatttggtgaagttcagaaaacaaggtcgaagatagtacctaatgctcagagtgaaagaggtttctctattggtttcccaagtgccttctctagctttggtggtggtggtgaccagagcactttcttgcttgatgaggagttggaactggaacatgtcgaccattcacgtgatgacctccattcacataaaaggtaattatagctggtatactctctattttccatgtctttattatttttttctaggtgtgtatgcatgtggtcaggggcggagcttagtgtagattaacatgggccatgaaccctcctatatgattctccactaatcttgtttctcgcgagcttattggacttgaaagtaatcatgaatttcattcataatccagtgtcacttgatgcatgcccccccttcattttagcccaagctctgccagactgccattgcatgtggtttggtgcaaattttctcaaactgcccaagccaaatcttgtctacttttgaccaatcttagccgccattttggttgagtgcttaagtttggtttgatgcctttctccaccttaatttattttgatggccaaagttggtcaaatcctggaccatttgccagccaaaatttggcttggctaagaacctaagaggtgacagtagcaaaccaaacataccttaagctttgtcaactttgcttcctttagccattgctcatatgggctagctacatagcttttttcttcgttgacaaagcagggtgtgcgttgtgaagaaacatgcccttagcctactgatgattgtttgatatttgctgcctatttttcaccatagttatgtgtgatagatgttcacaaacgtttccttatccatgtaagctgcacacttgtattttcttctatgttgccctgatacggggatactgatacgcgatacgccgataccccgatacagtatttctcaaaaaacaccgatacgccgctacgtaaatattctaaataaaattaaatgctgaaatagttgaccacacaatttcacaaatagtacatagacaataaagtttaggccaccaaggcatcaaacctaaaaacttcagtgttcagccttcaatttctaacagtaaca

SEQ ID NO: 493 - DNA, 926 bp, Zea mays
  source 1..926: mol_type = unassigned DNA
tagtcacatggctaattataacaaacatgcagcgcgggttaacgccactcgccgcgcggcgtaattagcgagggggcgcgagggtacaggcgtcattttgcttgctttgtcctgaccagtttttttccactgcctagtaacggatcaatggggccaggggggaaaaggacatggagatatggggacgaggggagcggaggtttgaaatgtgagggagaagcaaaagcccagataaaaaataatatcggttttgttttgcgtcttccgtttacgatttggggtgagcggcagtttggagtgggttcttgcagcggcgcggcagagaggtgtgttgtgcggccgtgctaggaattatcctgttccttcagtgctcgcgtcctgatgcgttttctccgacgatgatttcgtcgtggctacctgcatgtgctgctgctagtacgcggagcgctttgattcggcggaggcgttgcttcggttttggtttctttcgcccaagatttcagctttagcagccgcagccttttctcctcggccgattccagccttggcccggctatccccccttcaaaatcgcgcatagggtgggggttttactcggccccttgctgcgggcagcgcagaaatttttcctcgggcgttcgattgtcgcttagttgagcttcagaacctgattatttttgagagatttctggaggaattttgactcttgtcgtggaatttggggtttggcgggttgccagttttcagcccttggcgagttagaggctattgcctctgaagttatcgcctgttttgatgcgaattggggaaatttctggtccctgtgctgttcggctattggatttggcgagctggtgtttgagccctggtataaatcaccggtctgtgctggtggccttttgatttcccggtggtgatgctctctg

SEQ ID NO: 494 - DNA, 1440 bp, Zea mays
  source 1..1440: mol_type = unassigned DNA
ttgagacgctaaagaagcgcgatgagcagcccaaggatgcgcctccaacattgccagcccggcccatgtgccgtggccgtctgcccaccaccaggcggccatcactgcctgctggctttaagctcgagaatggcatggtaacagttcctgccacagaagctgcagcggttgacaagaaggcagatgccaaggagattactgggttggaggtcaaggaggaaaaggcagtgaaaggatgcatctttgggactaagaggaagttccctagcacacaagtgctggaggagtcgccatatgttgatgaacttcatgaggagaggaagcgtacaacagtttgtaaagagcccccttctatttccccggcaacaataaatatgaacgggaagccagcatgtacagatatcatggactatgttctccagaaggtgagaggcttgttcattgtggagtttgtaagaattatttctattattgtaaatttgcaatgtgaagaaatggaagtaatctgactacattgtctaacctgattgcaacatttcattcatgagtcaaaacaggaaatgttgatcaaattgtcccttacatgtgtttgttatatgctgaattaatagaccccctttttttaaagattatttctatatggtatatgtgaataagactttcatgtgagaacgtggttatgtttgggttatgcttagcttactgtgtttcacatttaccagaagatacagttagtgatcgcttaatgattttttcctggtctcacacttcagatttgttttggccagtttgtttgttacatccacaaatagctgcatgtcatgttactttaaagtttaaaccttataagtatgagtatcggatgaaagaacctgtttttttaaccttaggatatatggatactggatattcagaaagtgttgtttcttacagcagtataggtctcatggaactagttctcttatcacttgatggttcaactttgatgtttataggtttatattgtgattggaagaaccgtccgagataataattttttttatcgattttcagaagctacgagtttggtgttcttcatcaaatgcaaagtgggaacttggacagatccaatcaatatctggagatgatgctgaaatactcctggctaatggaaaagtgagtgtcttatattctcacggtggtatagtcacatggggacactcctgtacaattcttactcaatgtttattcgcgtaggttttgacggtgtcaccagaacaactcttgcctgccaaccctgatatcctcgatggagtggatgatttaatccagatgagttacttgaatgaaccttcagttctttacaatctgcaattgcgatattctcgcgatcttatctatgtaagcactatgcaatagcttcatcatgctaaatatgagaacataggtgagaaccaatac

SEQ ID NO: 495 - DNA, 1046 bp, Zea mays
  source 1..1046: mol_type = unassigned DNA
aaaagactacaaatctcggctgaaggatacgaaggtaaaccttaataaggttggcactggcacccatgatgataaatcgcggaaaagatggtggggaaagaagagctccaagtgaaacgtgtgagaggtgccccagatcatttttctactgccccgggccaaggaaagcggccaagaatgccagggcagacatgaagaacccgccttggttctcgcactgcagaagcctggcaagataatgatgagctccatcgccggtgggtggcggcgctgttactcgtccagagtgtcaaacagatcaaattagccaataggtgaagcaagagttctgtacatgtatatcaattaaattagttctgagttttcagttgacagtgtatgtatgctatcgtgtatgtatgtagagtgataaatctgagatgtggaagggtaactagatacagattatccaccatgagcgaatagagatgcaaaaaagcagtattgtaatatgtgtacatacagtaaggaaattgttgaaatgtgcaaggcattttactctgaaactttgtttgcatctcgcagtattatgtacaaatcatttgaggtacatacactgcacagcagttgaatcctgagtttggacataatgtcctattgtaattgtcaggctctgaattctgcactgctgtgctgtcggatagcttgtgtttcaaaaaaaaaaaaaagtagacacaacacaactacatgtatgtacacaaatctgttagcaactgaaacggagcatacatgcatggaatgaagatcaaaactagtccagtacgtcctgagttctgagagaagcacacgaatatttgcattctttcatcgtacgaatgtaatgtcacaacacaaacgactagtctaaaatgtgggcacgccgtacgtggcccgctagctcaagaccgtggcgcgaacttggtggcgtagacccaagcgttgttggccacggggtcgtcaaggtggtcgagcaggttctcgaggggtcccttgccggtgacgatggcctggacgaagaagccgaacat

SEQ ID NO: 496 - DNA, 2473 bp, Zea mays
  source 1..2473: mol_type = unassigned DNA
gcgacaacttgtccacattgcaagttcttctgattctgtccgtgataaaccatatgtgcagccactaaaggcaagcatatccttctcatagcgcaaatgcaaagcaatatatttcccaaatgacctcatcctctccaccaatagctgcaagaaaatcagttaatctttgcttatctaaacaacacacggtatacatttcagggaaaataatgatcaagatgggaagatatgagagagtgatttactttgcctagagcttcaattgggggagcaaatctcagtgcttggaaaaaagcccgacaacgaagcttctgaatgtcaggaggaaggtggttgtttgcaaggcgggaatctgacttagcagctcgaatgacctagtacaaatcttcaatcagtattcacagttccaaaaattgcatcagtaaacatggcttagatttgtctagtatggaagtgcaaagtggtggttgaattcagacctggcgatgatcccacagtggagaaatctcatcctggtaataatctactccagaccaactcttgaagtacctgacagactttggagctttcaccaattcctttggcagttctttctcaactttcacatcatttgctaaagaatttatgaagtgttcttcatcaaatacatctgaaaagttgctgatattgaaaagtggtttcatcagtctcttatcagttcatggaaggatgaaaacaaacccagcatatgatctaccttttgtcatgccaaaatgatttcttatcaagctctggaatgatgagtgtagcattaagtacgcgtgcaacagccaccatatcactgatctgccataagaacaggaatgttcaattaaaaaggagacaaaacatttgaggattttgtgtccaaagtgaggggcctcttattattcatttagcaacacagatatgtatccagtaaacaaagaacatgtgcaacaaacagtaaagaaacattcccctttctatatccaaatcacatgaagctgacattgagagtattaggacaagtaccaattggcaaaaaaaaaatcggttatcttaaccataagggaacctaaacaaaaacagagttttcattaaactcaagtgcaaataaaacactactagtagttagttccagttatctaacaatctgcatgcacaagtagagtgtaactgcttttggtctcccctgctaaaacgaacagctttctttgtccaactataaagaaaaaacaaaatcatgattgaaacttggcatgggtatgacagaagcacatccaaacaagtgtcatttatcagaatcagaaaaataaaaatgaacatgatattcaataccaagcaccaggaaaagaaattggaattgcaacgagaaaacatccacccaccaaaaattataaggagtaaccactctatctttaacgcagttgggccattcaatatgtgtcgccagtaactcaattaattaacaaaattctaattgggaaacaaacagcttaaatttagcccgccatatacatcttaaacaagcacatccgacatctctaacagagtggaacattagcaccagaataccaactgcacgtgattaaagcaccaaaggactgctcactgcccacagacactgggttaggcaaagcacattgaaagcaccaaaaattgtatgtgcaaaaaagaagagctgataatgatgggtgctcacaaaccgtcaactctgatcaaacaccccacatgcctgaacgacaatgctctcccacgcttttttttagatgagatattggccctccccactcaagtcaacacatctaatgcgaatcaagcaatgaataacttcggtcatcactaaggcaagtgataaatttccaccaggacggtccagcttaccccagcgcgcatctggttgagtccgccattggtgtgtacgagcaagtacccctttgacgccaccggacctgcaatgcaagatgaacaaaatcagaactgcgcacaataatttggaccatgaggcgagaaatccatgtagagggaggtgtgccaataatgcgcatacttctgtattccggtgacggcgccacgcagggcacgaacccccgcgccggcgccggcagccacagcctcttccccaacgcgtcgtcggccgcaccgtccagctgtcaaatctagagattaatcccggcgtcataggctcccatgaattcaaaaacagaacaaagaaagcaacagcggcggcaactagcagcgaaacagcatcgtggagaatcgttcacctttcgtgacgacgcgagctggggcgatgcgaactcctgctcccaccgcagctcctctgtatcccatggctgcgagaggcggtagggcgcgccggaggagacggagggcatggcgaggccggagacgtggagagtgacggcgagcagcgcggcggcggcggtgatgatggcgcccgctgcggcgagggagagcagccaccaccgca

SEQ ID NO: 497 - DNA, 1039 bp, Zea mays; identical to SEQ ID NO: 349
  source 1..1039: mol_type = unassigned DNA

SEQ ID NO: 498 - DNA, 1520 bp, Zea mays
  source 1..1520: mol_type = unassigned DNA
gatgccttaggctcccaggcaaggagacgcggacgccttatggccagagcacgccttagcatttaggtgtcgcctaagcatcgccttagggacgccttaacaactatgatatgtagtactaaaatgaggtgtttcaaatgaaaataataaaagcatatggctgcaagtgggaagtaacactgcattcagattccaaagtttatttctgttgaatacgaacacagttgtagcatatttgccattctgaacgcgtaagattgatttagtttccaacatgtcctcaaaggctaagcgtatctgaaggaagaggctaatgtcaccagataaatagaaaaatggaacaaggaccaaaacatggaagtccctactgcaaaattaaggcttacacatgggattatggggaaaaactattttcaaattagcacagttagatgcacatgcactatcatatgccaataaaggacatactcactttaccaggtaggtagctaagtcaagagtgatagcttaccaagaggcggtggaatacttttggcaatggaaagaaaaaaaacatttaaaacaaaaaaataggaaaatgaaaatagaaagcaacaatacattagagcatctccaagagtctctgcatggctatttatcacaaattacaaaatttcaaaaaaaatcaggttccaatagactttctaaccactctttcaactctccaaaaccactcttgttgctctgcactagcgaagaatctacatcactctttaaattccatatatagtagttctatcataaatttttgacacaaggaaagttactacaagtcattcgagtatagaactatagataatgaaattaagagagtccatgggaaataagagatacataaaagagaatattcatcggatggctctccaactagagataacagagatagaattttagagaagctctttgagttactattagttatcacatcaatcaatttgattttttatagtacctatagctaatttgacacatgttgcaagaaactagaacttccggggaccattccagaaacctacaacttcctcaccagaaacattgaaacatgagaccaccagtgacatgctacaggggctgacatgtgggttcacggttagaaagttatagtgatggtcttctgcaacaaggtgccaagaactcaaaataattgtaggtttctgcaatgagcaccagaagttgcttcctacaaatgtgtcaaagtagttgtcaatttttaaattttacttttaaagaaatcgttttagaaaaaagaacaaaatagacactaaaatgcatgcagtcttcataagtcaaaaagtatgaccacctctgtacatttagtttcttagattgcaaataattaagataggttttacgttaaagatggtgttaatgcccaactgtccaagtaacacccagctgaagccagagcataacgagaaaaagagaacacaagataaatcaccaatcatatattcaaagtaatcatataatattgtttctgc

SEQ ID NO: 499 - DNA, 535 bp, Zea mays
  source 1..535: mol_type = unassigned DNA
ccggatggtgttgccatgtatagcaaagcaagcgccttcttcaccggtcaccactcattcactcactcactcagccctcttctctccctccttctcagtctcccactgcggagacgatcagacgggacgacgctggttggctgataaatggatggtccttcctggccgctgcccgccggccgggtaaacactaacgcagtgccagtgctgctgttcctgctgccgctgcgtcctagtcctagcctagctaccgctggctggatggtgggtgttacactgttactacccaggaggggggagagttaccaggtgcatgcacccacggtaaaaaaataaaacgaaaggccgccgcgctctcaatactgttgccgcctcccaacagtagagatccctgctcgaccgcctgcagcgtgcgtgcttgctgctaccgtccaagcccgggccttgatggtgtgccactgttcatccattcaggccacagttaggtcgtcgacgtggccgcttgcctgtgcctgccgctgcggtgctgcctgcc

SEQ ID NO: 500 - DNA, 1863 bp, Zea mays
  source 1..1863: mol_type = unassigned DNA
ctcctctctctctctcttcgagtgaccaacccagcgatcgagccggcgctcattgccactctcgcaccagcccaccacccgtccgttccttgcctgtttatttgtttttaccgcggggttaaaataatccggcctgcggtgcttcctgaccgttgtgccctcgaggcgacgcctggattttccccggggacaggggcgtttcggtcgctgcggccacagtgcacggaggcgccctcttggtctcccgcggaaaggatggcgacgagccgccggtcaaagcgtcgcaattattaccggtgactagcctagcgggctcgtcagacgcccaggcctgtttcccgccccccaccccccacttcccttcccgctggaattattaccgcgcacgcaccgcgttgctcacgttataagttgcgcagcgcacagcacagcacgttcacatgcacgcaggaagaacgggtaaattcgatttacccatcattttacgcagcgtatatgtactgtgacgggctgtaccgtagtatttattgtataacgatgttactaatgatcgtagtgttgtctgtgtgtgactgtgtgctcgacttgttgggccaggtgcggaggtacgtgtacaatgacgtggtgcgccttgacgacctcgagaggctcatcgactgctccttcgtccaggtgatgcgcggaccgtcacgtaccagctactgtttctgctgccggcggcggctagctaaagggggatagtagcatgcagcggtggtgaccggacggacggacggcgccgcggcgtgctccgaatcgttttgaattattaaaaatcctgacccatcgtcgttctcatgcacgcatgcagccctacacgatcaacagtgccaaggtgatcttcctcaagccgcggccgcagtccaggcccttcaagggctctggcaacgtctgcttggcctgtgacaggatcctccaggagcccttccacttctgctgcctctcctgcaaggtacacagtgctattctgctgctgctactactactgtataccaccaccaccacccatacaagactacacgcgtgccaccaaaaatcttctacatatgcacatgcacgcgacagctgctaagctagcagcgtgatcggttgacggattattcaagcgtgcgtgcgtgcgtgccataatcagtcgcctggcacgtacgttagtaagttattaatcagccgtacgtcgcttcactcgcagtagtacgtttgcatgcacacgcacgcccatgcacgcttagattagatacggccccgtttccgtggttactgtacgctaaacccagctgtgggctgcacgcacgcacgcatgcaggtggaccatgtgatgatgcagggcggggacctgtccaacatcctcctgtacgtgccgggcgggccgccggacctgggctgcggcttcccgcgcttcgagaacctccgcttcgacgacgaccccgggcagtacgggcaggccacgcccagctccatcctcgaagaccccgtcgagcacgggggcagcgccagcgccagcggaggatccagcaacggcggctcggccaggaaccacgcgcggcgcgacgtcgacgtcccgacgaggaagaagaagagcggcgggggcggaggagggttcttccctcagatcgtcctctcgctcggcaacaggcggaagggcgcgccccatagggcgccgctcgcgtaacggacctgcatgcacagatgtcggacggactccaccgccgtcacgtcgccttgccgctatatatatatatatgtgtgtgtgtcctgcctgttaattatgtcgtttattactaccacccttagttagcagtgttgttagcaacattgcttaagtgt

SEQ ID NO: 501 - DNA, 2291 bp, Zea mays
  source 1..2291: mol_type = unassigned DNA
tcgtgaccctgtaaataggtgtccacgcaaacgtataccatactattcacgtgcttttgctactcttagaatgatctgcctctaaagctacccaagcattctcacactcctataaggtaatgtattgtaatagaatgtgatcatcaaggtagtataacagatggtgaacatggttcatgactcttccacttacacattttgcctctctcgacattcgtacttctgtaaccttcttcccatgtttcccacttttttcatgagtggacaaggggagaaagtgtttttaatttaattgtgttgtcgtgttatggtttctcataggagctttgataggtgaccaatatgcaaccttctagaaccttctacaaacaatcatggctaaccatgatacatgaaactttctagaaccttctacaaacaactgtggctaaccatgatctatgtacccttctataattttctatagcaatcatgataaaccatgaagcctagatatttttgccatgaagaagtcacctagatattgtggagaccaacaatcgtgatgaaccatgatgcctttttattgccataaagaactttttaacataggaccgactctagacctagacgagaggggcgactacctagggcccaaaccatcaggtggaccaaaaaatttattttcgataaatatagttagtaaaaattgctatatcagattatgtccataaatgcttcacttgaatagattaaaggggtcatctcgtattttaagaagtatatatatgaaggtttgagttgtaccattaatattggaatataaattgcaaaagtgatggatgtggaaccaaggtttcctacaaatgccaaggtaatcgaaagaaacattttgatgagcaaaatgatcaagatgaggattaaacattatcattcatagagtccataagatttaattattttcttataatgattgttatgccaattaatttattaaatagttgattcgagcaattacatgcaacattcttgaaccttctataaacaaccatggctaaccatggtaaatgcaaccttctataatcttctacaacaatcttgacaaactataaagcctaatatttgttgcaatgtggaactctatagatatttgtggagacatctctagaatggggacatgtgtctttcacccatgctcacgtgtaactatataagaggtgtcacccgaccagttgccatgatatacaacataacaaacttccaccacacacatattgggcaaaaaatgttgaaatagtgctaaacaaaaaataaaaatgaaattgatttatattaagtctagcataagcaacaaaaatgttgaaggaagatctaaaattgaaatggatgtatactaaggctaacataagtaatataaatgttgaagacaaagtcaataatataaacaaatagaatcccatattttataactgaatgatcatgaagaacgagttaatttaaaattttttaaagccaacttttggattttactagatcagtaattttctaacggtgcgatttatatttcgactttattaataagatctttatttaacattaatagtttttttaatgttttgtcaaaactataccaataatatttatcgaaaaatattaacataaagtaaaatttgatcccaattttcattaaattttgtttattatcagattgtaaatcatgcttgtttagttctgttatgtcggaatgtatatactagtatttgaaatgtttatttattataaaaaagtaagcttttaatccactttaaacaaacataatcataagattaaatattgtttatttaatgtacgttttatacaaagcataaaaaattatgggactaatgaatattaattgttttcaagtttgttgcagaatataaagattttagacatatcctaactttaaatcattttgaagcactaaatgatgtattgtttacaccgatagtttttacaaatcgatctaacttgttgttttgcatgcttcatcattaacacaagttcaaaacaataataaaatgagtatgtgacccgtagaattggattgtcatgtactatcactagaatatttcatatgaataatgaggtgactttgattattaatttctgaaggcacaagttatatttctagtatctgactttgatcattagcaaaaattaatagtttttcatttgttttttgtcacagttattcaaataacatttctttgtaaatattaaaaaaatttcatatgaaaaataaggtggctttaatcgtcaattttcatatc

SEQ ID NO: 502 - DNA, 919 bp, Zea mays
  source 1..919: mol_type = unassigned DNA
ttgaatggaaaccgcaagtctacaaactctcatctaccataatggccactatccattgtgaatgcaagcttatgttctctaagaaaattcaaggtgaagtttcagcacaagcagatggaagttcatcaatcacttgccatcagcgatagaacatgcttggatacacccagaagacctgcagctaggtgtaccagtccctcttgaactcaaggttacaatcgttgtctcgattccacacagcatccacatcatgtcagcccatgcaacagaagggcgctccattgtcctaagccggcacaagaaaacgcaggcctccttacatcacaccaaattaaccaaaattcacgaaatcttcctctaatttcggaatcttgcccttattatttgttctgagctgctatacacattttcttaccaaaatttttaaaaaacagtgatccacgtttgaatatcgaacagttactgctttgctactatgatggaatataaatctgttcacgtcaaattccagttccgaattgttctgcctgtcaaccgttacgaattatcttttggttccttcttttttcgctttgacaatatagactggttcttgtagttgtagacgttagtcacacacacatctccatccacaaatctaaaatcccagaattccaaaagaaaaacctaatctagacagcacggttcaaaaactgatctttgggtagacatcgtgggttttcttcatataaatttcaaaagcatacatcaatattttcctcaaaacagacacataacttaacaattacacacacacacacacaaatgaaatctcaaatacaataccatagtgacatcatctactcaaatataagaagtcttccctaaccaaacaactccaaggcaaaaatttctgcaacacaggacgggcacggatcac

SEQ ID NO: 503 - DNA, 1506 bp, Zea mays
  source 1..1506: mol_type = unassigned DNA
gaggaatctggcagcaaaggtctgcttttgtattggctagatcgatgacctgccatctgcgtagctcgtgaccatcaggtgcacgcacggagacattgggcctaacgaggagaggtggaagcaaggcacagaacctggatttggatgggtatgatgagaaggcagcacgccaagaacgacaggtgcttgcgaaggcaaggaggtcaatgaaggagcccaggagggcaacaatagactggagtgggcctccagggagatcagcccacccttgaatcccacatgtatcaggggctgcttttgtggaggcagaggtgccagatactgtgatagggctttgcatgatggcagtctcactgcaacaaagtaaattcaataaatgaactagaagcatgatttgaatacaaaatgagaaataggcagataacttccaagagacacagacaccctacagcaacaaaaaaatcagtacatgtgttgtacagatctgaagccactttttaagttgttatacactattaaattcgaagcggctgaacagttgtaataatcttaatgataagacaaataactgaataagagaaaggaaaaacaaagtttttaatccaaacatcttgtgctctggtttcaattttaaactttcctcactacttcctaaacccatctcctattttcagaacatgtgatgcctacggtacagtacataaacaagtaactgacacatgaaagagaggtgaaaactgttgctgtaattgcagaaatgccaatcgagtgctcaaatcaccatctaacataaaagtggattcttccatcctagccacatcagtcaggcattcgtgtgtttgaatatacttgatatatcaggtccatctgttgtagggttcttctgtaatctgtataccatacggctagtcggctacagcagaatgcagtgcaaattaaccatacaaactagagccaagatctgaccagaaaagtacaaaataactacctgacacaaattgttggcctagtttgaatcgagatgacggtggccatgcaaaaatgaacatagtaaaaaataatcgaggtattaggtgccagggaggatttcagtactcactgctcgatattagcaggtgtcctgaaacaacgttatatacactgatataaaatagacttcagatggtgtgcgcagaactgcagaaggtacttaatgatccccaattcaactagctagtagttcatttcctggtatccttctaccaggatgttcgcatgaatacaaagcaaggttgttcaaactaatatgtcgcttctttttctgtttctgaatttcaagggatcagagctgagcaacatttattaaagagttggactaaagaaaacgaaaaccgacggcattgaatacgctgtctctaagcagccacgtaagcagcaattaaatagaaaaatcctacgtggacgcaaattaaggaggagagagtcatcggtaatgcaaccactgtatgcccaattcactagaaaaat

SEQ ID NO: 504 - DNA, 565 bp, Zea mays
  source 1..565: mol_type = unassigned DNA
tgttatttatattgttcggatgttatttatattgttcggactttggacgtgtttttcaatacacatatagacatctgtgggctatacatgctcttaagacccatacaggaagctaagatatccacatggaaaaaaaaacaaaatttccttcatagtgtagcataataaaagcaaacgtacaaccagttcccgtttgcagaggaaccgtgacatacacacagtcacacacacagagttacacacgacatcaaaattcatgtctgctaggttaaattcatgagggagactactacggagcatcgaagtcgcgtcttttattgtacacatcagttacagcgcataaatctgtttatgtctgctaggtcactgaccaattaggcgcatcgatactagggtttcttccgttccgtacacctcacaagcacagcatcaaaatccaaaagaaaccaaactgcaatagctcgactcgggagatcccccggacaacaagaacaaatgcgccacacgattcctcggaatggttaattaagaagctgaaggactaaagaaaccgcagaatggaccc

SEQ ID NO: 505 - DNA, 507 bp, Zea mays
  source 1..507: mol_type = unassigned DNA
caattaagtctatcgtcaaacaacttcactgcgtagtttcagtagaaatatatttaattaaagtacatatgaaatacaaaactatttcagctagacgaaaatgttatctttattttaataatgcgaaaactcacaccctaactctagaaaatgagcaaagcttcacattatcacaaggaaccatcagaggccggtgcaaattcatcatcaaagatgtgtgcttcatttattatcgaaataagcttgataaaaaggtttataaaatatataaggttcattcacaaacctaaggacctccaacatcctccagattagaatatgaaatagacataatcaagactgcaaaatagattacaaatacaaacacaaaattaatagcccaaattcagctcctgtttcagtagcaatgagctaaaagttgacaaatgatactccatttagtcttgatcttcccaaggtttgcatagatagaattttcttattcatgatgcagtagctacagtaagg

SEQ ID NO: 506 - DNA, 2472 bp, Zea mays
  source 1..2472: mol_type = unassigned DNA
tgaatggaaatggaacaatgtcatcgtgtggaaaaaagtgaaaaaaaaactgaataacactgcaggccaatgagtgaggcttgtaagaactgcgtgtggtgaggaattcctcccgcaggccgcggcacacactcagattcaatttagagcatgtggaatcaatcaaacacttactccagtgaggagcgagctgattcagccgttggagaagcacgggtactatttaaaccgctgcggatttattatagaggaaaccgacgttacctccgaagaggcgcccaacaagaacagcgggacgcctttgtcgtcctcggcggcggcgcggagctgtggttggacagttggagcgactcttctgtcggacaagacgatgagcacggcgcaccctactttgaggccacacgtccacaacagccgtccgatcgcacgacgacggcgcaaagttgaaccgagcgaggacgggtctgggctggctctggtttgagccgacgaccggacgacgtgcttcgcagttcgcacgaacaatctggactggagtcgagttctgcgcaagagcgggcccgcccaaaacaataggtggcctcctgctctcccatgcatctccgtcggcccaacaatacagagtggcccaacttctccaatgcgcaactgctgtacgctcgacgtgaaggcgcttctcccaatctcccctccgactcccgttcctgcgccccaaaccctaggtccgttcgcggcggcggtggactgccagtggcagctctccgctcggcttggcttgggcagctgccgcgccgcgcacctacgggcagcggctgggcggcccgcgctcgtggcagcacccgctgagactgagaccgccaccggcggttcctgggctggaagccggtgcagcagcaggcagtagccatctcggccgccagttccaaaccctaaccgagtaaccgcagccgcagccgcagccgcagggtgcaggcacgcaccagcctcacgccagccgcgccgccgctccggccagccgcaccccgtgccggccagctgcgcccacgaaggtgaaaagcagctttacttgccggcttggttttaagtacaattcacatattaggcttgtgtcatcaagaccatgactaggttagcatctctctgtttaacacttcaacatctgatattgcactgtttctgataaagttcaactcgagtatggctgtgtttcatactgttcgatgtgcccttacgctcggtgtttcttttcctgatttcctttctaaaaatagtttaatattttgggttgtaacactggaaatctgctcctttaacatttggaggtggttattccctgtttatcagggttaaaagccaccttttctttatttcttcactggaactctactttctagtaatatgacaaacaaggttaattggtgactaaaagaagtttgactctgaagttcattatgttgttaagtacagctgtggaactctatttgcaatatgtttacaatttattctgatcacgatcacattttaattttcttgattatatgtcagaattgcttaatctgaaatcttcagtccaagggaaagggaaagttccttcaggctattttaatgctctctataattaagtggagcttggttgactgatgccaaagagaccaagcatctagcttcgactgatatttcatttctttgtactacttgcacctaaaggcttctccattagttctttgagatgaagtaaaaaaaaaggctgttccatccaagtgggatcctgttgcattgtcattaggactaaacgtcggccatccttgttcattgattgtggatcagagcagcagtggcatttcaatagtctcgtgagggtaaaaaaacccaggcaaaatgagttaaaaagtttattttttatctttcacggctggttactctgggagagctgggtcgttaaatgggtcaccacctagcgccttttctaaccttgagtaggtttgttgtaagcatgcttatttctacctattaatctaaatgtgcagcaaatttagatttctgacgtcctttcagttgaccttgtttgcagttccattatgacaagttctcctgtcgtatactgttttcctttcgcttttgtatacccacggtattgatattgtttatcagtattttgtgtataggaatctcaacttctttgccgaggtttatcgacagttgtatttgttgggaaaagtagcagtttgactctatataatagagagtgccatggacggacctgagtctagtagaggtcgcagtaagcaggaggttgatgataatgttaatgcaaggaatacttggaaggaggagcaagaaaatcaggagaatgtggatagcagaaattattcggatatatccagaaaacatggatatgaacatgaaactgggcatcaggatgataatagaatgattacaccttcaaatgataggaatgaatcaaggaggaat

SEQ ID NO: 507 - DNA, 2639 bp, Zea mays
  source 1..2639: mol_type = unassigned DNA
ctgagaagggactcacgatctcctaaagttcaaaggagaagccctgatgattccaaggatcgagactatgatagaaggaggggaagaggggacaataatgattgggaaccttcaagaagatttagccctgatgcttctgctaggagttcagagagaagagagggtagtagggagaagcaaggacaacgggatcaagatgaaagggcatcagtcaggagggtagatgaagtttatgttgatgaaactggtggttctcttagagttgacacaagagaagcttatagagatgataaatctgacagagggagggataggaattggaatgagaaaacccgagacattgaaggttctaaggactatgggaggaacactcaattacgagatactaaggagccaaatgattttgaatggaggaatgcacaggaaaggctagatggcgggaatttccatggccgaactggatatcggagagattctaggggtagatctgaaagtattagaggtccctcaaactatgggaaccgatacgacaattcagactcaatagagattcgacctaatagtaatcttaactttggaagagagggctctgtttctggtagaagatttgaaaccggagcacaccgagattcagtacctggaggaactgatgataaatcctctgatcatcttgaaccagatccaagtggtagcacaagcatggtttcttcgtttcctcaacaaggtccaaaaggcgataggtcatctagaggaggaaggggtagaccaaatggaagggattctcaaagaattggagttccaatgccaatcatgcctcctccatttggtcctcttggacttccaccaggaccaatgcagcatatggggccaaatattccccattctcctggtcctcctctcctacctggcgttttcatgccgccatttccagggcctctagtgtggcctggagctcgaggtgttgatgtgaatatgctttctgttcctcccaaccttaccattcctccagttgctccagaacataggtttgcaccaaatgtgggagctgggtctagtcataatatccacttaaatcaaatggacactgggttaggtggtccagcagatatatcaggtttgggttacaataatatgggtcctcaaagccgtgaaatgctccatgataaacctggttggatgccacataggaacagtggaccaaacagaaaagctccttcaaggggcgaacaaaatgattactcacagaactttgtggacactggcatgaggcctcaaaatttcattagagaactggatcttacaagcgtagcagaggactatccaaagttgagagaactcatacagaggaaagatgaaattgttgctaagtcagcttcaccgccaatgtattacaagtgtgacctgcgggaacatgttctttctccagagttttttggtaccaagttcgatgttattcttgtggatcctccatgggaggagtatactcaccgtgcgccaggaatcacagatcacatagaatattggactgctgaggagattatgaatttgaagattgaggttttccccttttctttatcctttctattttgtgatttcatttatgctgcagaattaatatttagaagtgtattttttgaatcaacaggctattgcagatacaccctcctttgtgttcctttgggttggtgatggtgtaggccttgaacagggtcgtcagtgtttaaagaaggtagagcctgctatttccgtacttaaatgactgcgctctatattattattgtaatgccattcgttttgggggatggggtgggatcttgaaatcattttttaggaggtcacccaggttcccgcagcttcaaatcaatttttgccctctgatggaatgtcgtagcaacataaacattgtttcatacttccacagttttatttcatgtatgtgtgttttaattttcagttgttgatgagctgcaataacaagtagatgaggctgactgaaatttttctatgatcagtggggattccgtaggtgtgaagatgtttgctgggtgaaaacgaacaagaaaaatgcagctccaagtctgcggcatgactcacatacattgttgcagcactcaaaggtagtgttgtacttgattagtatgtgatgtatcattttctgccatgcctacatgtctttttcttcttctgtttttctctggttctcatgcgaagtatctaccctttccatgtgcaggagcattgcttgatgggcataaaaggaactgtgcggcgtagcacggatggccatgtcatccatgcgaatattgacacagatataataatagctgaagaaccaattgatggtatttttcctttggtttattagttttgttcctattcttgatgcaatctatactattggcttatgaccaacggcaatcattttcaatgatgaggtgcatacactgagtaaacttgttttctcgaaattttcttctttgctttctttctgttgaaaatggagttccctgatctgtttttattgctgccatggtatgaatattccaattttgtccaccaaaatgtgttactgtgttgtaaatttggcttggttggcaaaaacatctgtcttggatttataggaatttgggattataaac

SEQ ID NO: 508 - DNA, 2419 bp, Zea mays
  source 1..2419: mol_type = unassigned DNA
ctggctgaaggcccctctcagtagctacttcttgcagtactacctagatgctttgttgtgcactattaaagacaattattcttgtgttttcagatgcctttcatgggtaatctattaggcactacttaccttgcacctgattacatgaacaattgtgaagtttacttgaattcatgatttctctgaaattgtaaattttgtgtttcataacccatgtgttcatgtatttttctcttctttttgcatgtagtgctattgttatcaattaaatagccaggtagtgctctaatattcgaatattgataaaaatgaaatcccaatcataaactaagttcaaatattatcattctatatacattatcatgtgttatgtgttgtacattctccttgtggttgcaactttttattaaggatttaagcatccaggtgcatgagcctaaaatgtcaagtattcaggtcagaggcagtagttattatacgacacttatttaacagttgtccaatccatttcaggaaattttatgttatcaattagacctgatatttcggaacattctgaaaatattagccggttagcttcagtgaagtggtccgaggacatcattggtgaaaaaaccatccgaatatctgggattattgaaaaacttaactataacctaaggaaggccttcaatgttgattccatgaagtcttctttcagctctctaagttgccctgttttttccaatgggcatcatgttacagatcttcactttttaattcatattcttggtagagatgtgcctgtgcagcctacaaatggatctcgagttgctgaaagaagtgcaccagttgctttacagttccagagacaaattttcatatatccaactgtgcaagtgtataatttcttgcaaacagacatacacgtgcttctgacagattgccaacagggtaaactcttatgtacgagcatttagttttggggaagtggatgttcctgttgaaggaagcaaacaataaaaagatatgttttacttaattcttttgtatactataatacaggaaacgtcatagaagatggctttggcggtattggcaagcagacaacaatcataagtggttcaagtgcttatttctatgtgaatcctacaatgtttaatttctcagtcacactgatttcatatggttcaaagtctaagacagttaatagtagtgattgggttaagagaatgcaaaagcagactagtaaagctcagtttcttgacatgcaattagaatttgttcctgggaagtttcattctaatttgagattactacgtcaagagaaaggcttgttggaggtagaatggcgattttgatgttgttgcttcttaatttcccattgacatctgatgaaaccgcttgacttcgagaaatttaaaagtttgaagatatcaaatgatctatctgatatccagtctcttgattgtgcaggttgctgtattcacaagatacacattacacaataccagtgactacatgctgcagtgcacagcttcacataaaaaatcactacctgtgtatgtaaatttgtgtactaggtaagcaatcttacatgattgctcataaaatgctgaaatcttgcaggttggaatctggaatgaacagtatcattcttcctccacaacatggttgtattttgccctcaatgtcaatgagctcctggtttataaagtaagcagtcacattagttttgttctctgctgattgaaaaaaatggttcttgattcaacacagcggagatagctattttgcacaaaatttcattaagcctctatatcttgtattgtagagtttgcttttgcaaatagtcaatctggtatggttatgaacactttgttcctcacctaagcctcagcaggtttgtttgctctagccctagcccaatgatagacttgcctgatcataacacagttatttcagtactatagattatgttagaaatatggccaattgcccacctgatgtggtatcataatcatatggctggtttaatggttcctgccagaaagttcttcataaacagcaacgtgcatcgtctgttccatgttacaacttacaagcacacattttttcttaacttttggtcttattcaaggtgaggaccatataattcatatctgttcctctacatggctgtttagcctgtttacacgctgtgtaaatgctacacaatggcttgtcgtgtttgtttaaccagccacttatcctgtttaatcgccgtttagtctgtttaaatggccatttagcctttataaacagctaaacgataggttactgtttagtccgtttaaacgtttacgctaacattttgtttgtgaaacattcttcattggctaagataattttgattgttgatgatatagaatataaagtcaggaaagtggttccattttcc

SEQ ID NO: 509 - DNA, 998 bp, Zea mays
  source 1..998: mol_type = unassigned DNA
agggagaaaattgtccgcattgtcgcgttaaagtcatatatgtaaacttgaaatttgaaagtaatacaagggcacaaagcatattaataggactaatttacttatgcttattgataaaaaggttgacacaattgaatattgtagtggttatactaaggaattgttgcccaaattagaggctgaacagtagagtacccttcttgtcttcttcagtagtagatatgatgtatgtcataaatctcaaaatcttcatgctcaagtctgatgaatagacaattatggaagctactaaacgacgtcaaataatatagttcaaccttctaatctaaggaaactatatgagaagcaaatcagacaatctatggtttatgttattatctttttcattgtttctcatttttgtttttatatgatttttcttgctgatatctctgttgttacaactttagaaaatatggagaaggtaccctttcttaaagtagtggtggagcaacgagaaatcaagatggtttagggtcaaacactcaaaccttcccccaaattgcactcattatattactctcatgcctaatacactttttatgtttctctcaaaacaatagtggatcccttcgcagagccaagcagttagaaggacataagtgaaatatttctatttcatcatttttaatgttttctattttcgacagttgtaagcacattgtttaaatctttaacagacattctcaatcattatattaagattgtgaatatgattgtcaaatatctgtctggaagtacaaacattcttccccagatttgttgcgttcaagtaattctgttgtctcactttatcgttacctactgtcgaaatattattcttaaaatttttgcatttgataacaacttcacaccctaactattaaattgttgttattgatagattctttgttggctttgagctctcttgattgttttatcccatcattttctatcttaaagaaaagtatttatgcaag

SEQ ID NO: 510 - DNA, 2692 bp, Zea mays
  source 1..2692: mol_type = unassigned DNA
accggcgcaagttaagggaccggaaatgcactttactcaaaaaactatatatttggcttatggtttcatgctttagccctttttggatcttgtgtgataatttggttttggaaataatgtgttcgggtgtaacaaacctggtagatcctaaaaccattgtgttactaaaattttagtcatttgggagttttcgaaactgcactctagagcacatttatttaaattgtggtgttgcacttctcttggttctagaacaacaatttcttcataccaagatccctcaaaactacaacatccaaacatgcccttacattttttttcagtgctaataacatgacatttgttgtgtgttcattgcgctaactgcggtgttggtaactttttgtgctttagtgaggatttgtctatgttcttgggtccagcttgtttggttccgggtaatataaatttacgtgaaattggctattgggaatatctgagataacctctgcatcagtgagataacctgtcttttaacagggacttgttgtgcaatcattgtttctggtctcaaatttgaatagcacaataagataccttagagttatttgttttgttttcattctgttttagctagcatgttgcattatatctataccgaggaagatggtaactgtgttgttagcgataattgaaaatttaacattaagtttgttgcaatttcttatccccttgagtcatatgtgttggcaaactgttgtttatgtaatactgatgtattaccactgtttgatattttccattttgttctttcataggtgactttctccttactaagttccatttatttgcttcgttgttgaaataggttcgaatatggagtatggaatctgtgcataaggacaataccaacaatgattcgaagcaaaggttgcttgctacactgcgtgatcattttggatcagtgaactgtgtgagatgggccaagcatggccgctaccttgcttcaggatcagatgatcaggttatcctaattcacgagagaaaagctggctcaggtacatctgagtttggtagtggagaaccaccagatgcagagaactggaaggtcattatgaccttgagagggcatactgccgatgtggtaattatcttctaaaattccactgtgctgtgtttatgtttgtgataattattttgtaactatagaacaccttttccatttcttgtgcataaggtaggtagatcttagttggtcccctgatgattcaacgttggccagcggtagcttggataataccattcacatatggaacatgaacaacggcatttgcactgctgtcttgcgagggcacaccagcttagtgaaaggggttacctgggaccctattggttcctttattgcaagccaatcagatgataagactgttatgatatggcgtacaagtgactggagtcttgctcacaagacagaaggccattggacaaaatctgtatgtcgtatttttttatttctctgttagatctagctgtgatcaacctgtcttactgaatgcctttctcattttgtttgttcctgcagcttggttcaacattttttagacgacttgcttggtcaccttgtggccacttcataactaccactcatggtttccagaaacctaggcattcagcacctgtgcttgaaagaggcgagtgggctgcaacttttgactttctagggcataatgcgcctattgtggtagttaagtttaataactcaacgttccgtaagaatttctcaaatgaccaagacccaaaggctgcaccagttggatgggccaatggagcatcaaagacaccaacaaaagagcagcaaccatataatgttattgctattggaagtcaagatagaactattactgtttggacgacagcgagtgcccgtccactatttgttgctaggcattttttctctcaaagtgtggttgatttatcttggtatgagatgtcaattatttctctacaaccattattaacttgtatgctcaaactcatgttgatattgtttgtttcccttgcaggagccctgatggttattcactttttgcctgctccttggatggatcagctgcaaactttcactttgaagtgaaggagcttggacacaggttaagtgactctgaaatggatgaatggaagaggaacaggtatggtgatgttggaggacgacagtcaaatctagctgaaagccctgcacagttgctgctagagcaagcatcagcaaagcaatcagctggagaaaaggtgacttcaattgtcgagcaaggtaaagcacccccaaaagtttctgcaggtgtgcctaacccaggtcttgttgtgctaagtctcgaagttcctgaagtgtcacatgaagactctaagaagacagcaggtccaactgctgatgatgtaaaaaaaggcaaccagttatctagtccagtgaaacagagagaataccggcgccctgatggccggaaaagaataatcccagaggcagttggatttgcttccaaccaggataacatacccaaccattctcagaatcatcctgtgaatttttcatccctggatcaacgaatgaatggaacaaaaccatcttatggcagtaacagcaactctaataactgtggagttaaggatcgcactagtgtcacagcaagggcaaacataactgagagtcttgttattcaaa

SEQ ID NO: 511 - DNA, 582 bp, Zea mays
  source 1..582: mol_type = unassigned DNA
ggtgagccagtgtgattacatttgcggcctaactgtggccagtccagttacgctggagtcactagtatttaggtgacactatagaagcggccgcgacaacttgtccactatttctacctattaatctaaatgtgcagcaaatttagatttctgacgtcctttcagttgaccttgtttgcagttccattatgacaagttctcctgtcgtatactgttttcctttcgcttttgtatacccacggtattgatattgtttatcagtattttgtgtataggaatctcaacttctttgccgaggtttatcgacagttgtatttgttgggaaaagtagcagtttgactctatataatagagagtgccatggacggacctgagtctagtagaggtcgcagtaagcaggaggttgatgataatgttaatgcaaggaatacttggaaggaggagcaagaaaatcaggagaatgtggatagcagaaattattcggatatatccagaaaacatggatatgaacatgaaactgggcatcaggatgataatagaatgattacaccttcaaatgataggaatgaatcaaggaggaat

SEQ ID NO: 512 - DNA, 2639 bp, Zea mays; identical to SEQ ID NO: 507
  source 1..2639: mol_type = unassigned DNA

SEQ ID NO: 513 - DNA, 1114 bp, Zea mays
  source 1..1114: mol_type = unassigned DNA
attgaacagatatgaaccaaaaagaagaaagtagtcaccgcaactcatctgtgtcgagtggagatttcttcacgctcgtctcaggcgctcatgtcctgactctcgtcggcggccacaggtacaacttcattggtgacctagggtcatcacatagagacatgctagctgtctggtgggatgaatcaacatggatcgccatatccaaagctgctgcgaaggtcatcgtaggcgaaacactcggccttagcaaaggaccgtgccacggcgaaaaacggttagcaagggattcaggtttctcatgctccaaatgatcaatgatcttgttacaaattgtcaaagctaacccactttcagcattgttttctgcttccaataactcatttatggtaaagccttgttgtaaggctaacttagtgagaacaggtgtagagggaacaacagtgccatcatccagatcagactccgcatcagaaacagctgagtgatcccagaaacgacctctcagtgcggtctcaatcccatgaacatgcggttaagattttttggtcgactcataaacgatctccctttctttatgatagcactcgaaatccatgagtctatgtctatccacgtccgatctcaatttagaatctgagacaatgtctacagagctcgaccttgtgggcggtgccaacttgtttcgcataatgaagaaccaaggaccagaagaagaagaagaagggggagaaagacagaagagatatctggagccaaatacttacgccgcatgaaggaggtgacgccttgatcttaataaagatcctaactggcagtgaacagaagacgtcggaaccaagtcttccaaatatgcatcagttcaacctgaagtaaccagagatgaagaagaggaagccgatgaaaacacatcacacgtttacgaactggtatctaccctcagccatccgatgacatcccaacggtctggatctatttgagtgaaaggggtaccttgcatcaaatatgagcccacaaactgacgatcaatggttcacattggatgaaccctagatctattcccatccgcacaaccccgatcagacgttcacgaggtcgtcttctttcccatgctcgg

SEQ ID NO: 514 - DNA, 869 bp, Zea mays
  source 1..869: mol_type = unassigned DNA
tgatagagcagcggctgtcaatggcggcagctgggtctctctctcttaccagggatctcccgatttccccctgctctcagtattgcttcatggcgtctttgagtccgcaatcggctggacgagaggaggttcacggtcaccaatttatagcgaccatagatcatggtctcgtgagaggggaactcggccaactggggtgcggttgttacaacaaccagcgacattcacggggaggaagacgcttctggtgcaaggggcccaccaagaagccactgcgcgcgcgcccggctaagtaattgtgaggctgaccccgcggccccacaagatcagtgacacgcagaaaaaaaggagaggggaaaatgatgggcctccacgggaaaaaaacaagggtttaatgggccgctcgagctgcgagtggagaaaagaagatgggccggccgaagcaaatcagcataaacgcaagtatgatctttccttttgttttttctatttgctatccaatttcaaaattgagttcaaatctgcatttgagattttaactttaggtttttaatgcacaaacaaaaacaccagtataaaattcgccaaattattaatctaagtattggttgacatatgcaatacacaaataattttgaatgtgaaaagtttaatttagaaattcaaaaatattcattatattttttgtgaaaagtaaggttcaatatagagaattactttaggttggatatattctttacaagtattttatctatatagtttattccaaagtacttctagtcttacgatgattatattctcccatcttttcttagaatgagatgaattttctctagatcccaaaaacatggttttggggtgttacaatt

SEQ ID NO: 515 - DNA, 659 bp, Zea mays
  source 1..659: mol_type = unassigned DNA
attcacgaggccatcctccacacctatttttttcggttcggtcttttttttttgcgatttgcagccctattattcttcctgacgtgttgtcggcccttcaatgtgatgtttcatatataaactcaaggattagattcggatgtgcactttttctagggcggctattattaggttggagattctgtagttccttgcatcggagctgaacatttttgtggatactagatttgcgtttgcttgttttgaaattgtggtctatgtttaactctgattgcttggtagattttttgggcttgcaacattgtgcgcctattgttgtttagctgggctttatgaatggttagtggctttgcgtttgttctggttatatttttagttattcatatagatttccagaactagggtttgttaggggataaaacagtggtaatttttgtttgaattttgctgtggaacttgagataatttcaccctaccaaacaggcactatagatggacccttaactagagatgatcagtttaactatagatggaccctaccaaactagccaagttacttaacttgacatgagaagtttaattcggtgagccaccctgtttggtaggcactataaacactcttaaaatatgcattagaaaggtggataattcgataatca

SEQ ID NO: 516 - DNA, 586 bp, Zea mays
  source 1..586: mol_type = unassigned DNA
aacataagaagtgtagttaggcatgcgagtaatataatgagtgcaatttggggaatgtttgagtgtttgactcaaaccatcttgatttctcgttgctccaccactactttcagaaagggtaccttctccatattttataaagttgtaacaacagagatatcagcaagaaaaatcatataaaaacaaaaatgagaaacaatgaaaaagataataacataaaccatagattgtctgatttgcttctcgtatagtttccttagattagaaggttggaccatattatttgacgtggtttagtagctttcataattgtccattcatcatagacttgagcatgaagattttgagatttatgagattcatcatatctactactgaagaagacaaaaagggtactctacagtttcagcttctaatttgggcaacaatttcttagtataatcactacaatattcaattgtgtcaacctttttatcaataagaataagtaaattagtcatattaatatgctttgtgcccttgtattactttcagtttcaagtttacatatatgactttaacgcgacagcgcggacaattttctccg

SEQ ID NO: 517 - DNA, 1614 bp, Zea mays
  source 1..1614: mol_type = unassigned DNA
ccaagtccccaatgaccagctttttctgctgtaatacacgcatgttccattacaagctttagaagcacatttctatcttcatttgatttaaagtaacatgggtcaaatcctgcgtagctagctgttctagatttagccctcttattgatcatctgttctagcttgttcactgttcttgttgggaatgtaacctcagtaacagggaatgaaagatgctttcttttggtccatataccgaaagtagttcctagtaccctttttgattggcttttgcttgctccatgagtgagtcattctggtgctatttcttttgcctaatttttttaatcattgttatgatgttaggtactctttttagcattttttcttcacctcggtcgaaagtgttactcggagctcttaattgatataatcatgtgcaggtctccaagacttagtatcctttcggtcaaaactagcccggcagtaaccgatcgatcaatgcttattgtcggagcatgctgccccatgctcacagaactggacatcagcaactgctacgagatttcatacaagtcactcgaggtgatcggccaaagctgccagaacctcagggtcctcaagcgcaacgtcttcaactggatcgacccatcggagcatgccggagtagttcctgaggactatctgagagaatgccccgaagacggcaacagggaagccattacgatatccaggttcatgccgaagctgagacacctcgagctgaggttctcgaagctgaccgccgtcgccctcggctccatccctgaaggatgcaaggacctggaggtcctggacctgttcggctgcgcgaaccttacgagccggggaatagaccaggccgctgctagtctgaagagtctggtgacgctggtgaagcccaacttctacatacctcgctcctccttccacatggggaggtacggccactggcagctctacgacgagaggttccagaccaatgtgtttcagatatgatcatagtctcaggtcaggtactcaggtgctccctttgacctatggtttatattctgtgtatgtgggcgcatatagtggcaccaataacgtgtggtttgaatcgtttctctcgacaacattttgtacagatggttatgctccagcggtttgtggagtgtggttggttttaatataaatgacttattgcctgcaaaagagatgttttgttttggctctctactttggttccaagaacgtgacataacatggttggcttattcgatcctgattgcaaggcatctttggtgcctggccctgggtgtcgtcttcctggccccatgttgcacttgcgcccgaccgtgaccgctcgctcgatggcgttaccagaatgccagccatgttcgtgtcatccgcaccgaaatccgatgcgttgtcgacttgtcgcgcatcacctttcgggcagctgcctgactgtctgcatcttttttttcccagcagcagagatgaggctatacagagtggctccaattatatctaatccccagaagtatttcctctagcttctgccaagggcagagctgagttgagacatggaaattgcacgcatgccttcctcgaaaaggctgaaaccttcccttt

SEQ ID NO: 518 - DNA, 1162 bp, Zea mays
  source 1..1162: mol_type = unassigned DNA
agaccagctttaccttccctttcgttcaacgacatcacactgtccttttcaaggttaacatatgcgtaacatacatgtggttgatctgcatttacagttcgtgaaaactacatatcagaaagagaaaaaaatagtggacaatgtatcccatccctccgtttgtaccagtcggtgactgacaagagatggaaatccagttggctggcttgatcctacactgtggttgagatctggcaagcaaaggccaatggtccatggagacggagcagcaaaaggccaccgaatccgcacattgctggttccatatgtctctcttttgcctagcagcacatcactagaacccaaagagagagaaaaacacaagtgccagaatcagcaacctctgctgggatttaggtcccattattaggcctggactgtccctaattttgtttctaaacgctatataatccaacgatgtgtaaaacaagaacagatgaacagctccattcacgtggtttcctgatctttttcagattgtttgccgtcgagagagagagagagagaaaaggtcataatggaatcaggtgccgtcttgccaaataaggtgcttgccttatcttggcacagcagtcagcaggatttataagaagagtctccggggagactccacgtccgagactcagacctgtgaactgcttctggtggcctgtccatcccaagatgaagagaggcaacaccgtcctcgccacctccatctccgtcttggtcctcctatcccttgcctcccaggtctcacggtgtgcagcagcagcagcatccgagggaagcgccggaggagtctccacggagcggcggcgggtcaggccttatctccaggtgcaagaacaattggatggtatggtcagcattgctctcttttttttttcttttctcttaattggtgcctgaaatattgccgtgtcgccatgcatgattgcacaacttatcctacggagaataactcgtctgcgacaaactgattggcttgttcgtgaactgaaggcgacatgaaagaccacctggaaaccgggagtcctagccggaggcttgggcctgggcatgaggcggcgggcacagtggagctggagcatcatcacaggaggattaccaccgggcacaagggtggcagcgcgggtggagt

SEQ ID NO: 519 - DNA, 803 bp, Zea mays
  source 1..803: mol_type = unassigned DNA
cttaaaatatgaggccttaatctcaaaatttgtactttctgtctgagggtcgttaacaaaattttcagggcaatcaataaaatatgtgtcattgaacgggtcaccgccaacgcctacacaagttgaccgccccaaatgtacagttgccgtctgaaacacctatcaacaaaagtcagacatgcattaaccaaacaattacccgattaggttcgcacatacacaaaaggtcatgtcaggcataccgcttcatatgtcaaggtaccagaacgagatatgatcccaatatgcccatgcttgtggacgtaacctggaacgattccaattttacactcaccaggcttaatgataacatgacaatttggcccaatcaattgagttttagactgactgtttactgcagctttcactttcacctaaatttgcagacgaaacattatgttgtcacctcatggagttccatcaacacagcaaaatataactaactgatctatgacatgagtcaatagcaatatacagaaaaaggaatgtccacaagcaagccgctcaatgaaccatggtagtaaaattgtgtctaattggatcacctacatctaattttcaaaatttgagccccatcctgcacaagagactaatagccgactgcatgcctatatgtgcaagataaactacgatgagcagtaaccatatgggcaacgcacggtatggacctagtgtgtgtatatatatccattgtggctttgagggtacggtacgatatttttatacttgggagaaaaatctatcgggttgagaatcaaacttgc

SEQ ID NO: 520 - DNA, 517 bp, Zea mays
  source 1..517: mol_type = unassigned DNA
aaagagtttgaagaaatcgatcaaagtccgatttgaaatatgttatgatagcctaccattgacaagacgaagaaactacggaaaaatagttttaactgccagataaggggactacgagccatatagatatctcagaaaatcgattgattttgttgcatcgaagtaaaatgttatttttgccataaaatttattaggagaaaataaaatttattagcagcgtctgtatcgtaggcgtagccagatcggatccatatcacgttcaagctgatccgtctagaaaggtaggcagtaatatggagtctgttgctgcgtgcgtctattgaaagaagtaaccagatattatctcgcctggtagtccagcgaacggactcgagtctgttgctgccgctgcggggatcggagtccagttcccgcgtaatttcgcgcacgcaacaactctcatccctcacctatttaaacctacgcccacaaccgcaagccccagcagagcacaccgcctcgacgttctgcgagcga

SEQ ID NO: 521 - DNA, 1103 bp, Zea mays
  source 1..1103: mol_type = unassigned DNA
cgattaaaactcttcttagtcaaaattaaatagaaaataatttaatactcctcgatctccaacccaacacagccattggtagccaggatcaactctaacgcacacatccacgaaacccgcgcacatctcaacgaagagaagcgttttttttattcctgtttaatgcaatgtaataacaagtcttatgtacagttgcaggctacaggcctactcccactgaaaagaatcgccaccgaaccatcacgactctgccaccgccagcgccacagccaccacgttctgcccggcatccagttcttctgacaccgcgttctggtcgatgaagttgaacagcgcgagccccgcggcccacacgtcgttgtccatcaccgactcctccggcgagtggctgatgccgccgcggcaccgcacgaacagcatcccgatctgcgaccacacaatccggagcgtgagcgagctgagcttcactattcagcacactagtcaccgccaacctcacattcgttcgcacgcatgcttcgtcttcttaccttggtgagcctggccatcgccatcgcgtcgtgccctgcgccgctcatcagcacgggcgtctcgccggccgccacggtgcgccccggcattgccgacacggtcgaccgcgccgcgcgcttcagctgagacgttaactccgggtcgcagtgcgtcgctgccgccgagtgctggtgcaagcgacatcaaggtcagactcagttcggcagcacaaactctacaccggcagatatcatgagccatgacaccaagagtgctgattcggtgctcctcctcaccttatgctcgaccttgcaatcgaccagtctgtcatcgcatttctggagaacaagcctcgagaagctcgtcacgatcgtctccctcacttggtcgtccatcgcgcggatgtccaccgtgaagtttacctgtcgtgggcacagctccaaggttcagctgactgatctgagccaccagttcatcagcagggccaagaagagtagtgcttggcaagcttacctggcccggaatcacgttgctcgcgcttggccacgtgttcagctcgccgacggtgcacaccaggccggccagggactcct

SEQ ID NO: 522 - DNA, 2252 bp, Zea mays
  source 1..2252: mol_type = unassigned DNA
acagaggcgttccagagtcacaacgagctctgcagctgcaaccatcggatcacggcgcaatttcattggaactgtgccagcatgcccttgcgaaccatctactattacctaggcaaacaaaaacaaagactaagcgctgtaactactttccttctcactcgaaagcttggtatacaaagggacttggaagcaacccagaattattaatgacagttgtcgtgggcagcttgagtatttaaatgtcaatgttaaactgaacaatcttggtgacagcaatgcctgtcttcctgaacattaattaactaagacttgttcttgcatcaaagatgacacatgacataggtgtgccaattattgaatgagatggatgttgactaataccccaggtgtttctctgattgattgtttatccattacatgcacatacttggttaacttaatattgaccactcataccctttgctaagagaacactcctatctagaattatttgattgcttacctgttgactgctatactgtcaccttatggttatctaatataaccggtacttcttttttctcagacacatatagtaggctctgatattgattgttttataaggaaagaatgaccttacggtaggaagccatgcagctagaccatattttagttttgtaaatgtagttcttgaatagatttcacaagaatagcagagaactccgatgcaccttcaatcgtgtctgtcctgcaattccttttacaacaccaagtggataatgaagggcttccaggacagggccttgctccatgtgtacctacagtttttaaaaatatatatatgtgatgtattctgtattaccaggcaactacatgaaaaaaggcatacgaaggcttcatacctcaacataactccccacagactccgggttgtacctggcttgactaatagcagtagaggtagcctcaaaagaattcattttcagaacatcttgtagtgtagtgccactgatgaaactcaatacaacaaatgaactgcatcagagacagttctgtaaaatagttcggttggttcacgcgaaaaagacaacacctcttatctgatacttgtaaaattgattcaggtagtgtaccagctacagcagcgcttcccagaaaagttgtctggaatctgatgccctcctcatcgctgaatgcaatgacctaagcttcaaaaaggaaaaatgagtgctaggctccgccatgatgatttttccaggtgacgataatgcaatctaactaatgctgattcataatttgataaaaaaaataatcttcaagccactttggattagagcgttgaagccatacagtgaagaataaaccatgatttggttcacaccaaaacatgccgaccttgatctatagatgatatctagacatttgtttactgaaatgcatgacacaacctgacaacttgtgcattttgattatcaggattgccagaataacaaaagatgaaccgtgcacagaatcttttcaagatctgtaggaggtacgtcgaactgattaaaggggcattataaaactagattcctccaggtttctatagtctttcctgattatattatgatagtaataaagaacctactaggtaccttgcagcttagctatccaatcagcatcaaaagtacaatatataattaaaactgagtaaaatataataactctatgcctgctactggcaataaaacaatgtgaaatattccaatcaaacaaataaaagagtagatggacacaaacaagatcaatgcagacaagtgcgggtctacaagacgtatgtggctcataacgccacttgtagagagcgagaatagtataaggccattcacaagttgcggtggagcaaagaaacacatttaacatatgatactatagtaacatctttagtatactggaagcagtagagaattctctaacctccactggtctcgttaacctctggagtttccccgtaactttcaaaaccttcagtgctgagattgctgaaataatacccaaggctccatcgtacatcccagcatcaacgacagtgtcctgttttttgaacaaggaaaatcgtatcagttgtcgcaatattggatcgccatcaaaacactgaaataaccggatagaggaagatagactcaccatatgagatccaatcaacaaggcatctctggtagaatttgccggctcatatcgaccatgaatattccccatctgatcgacccaccttcacgttgagcagagac

SEQ ID NO: 523 - DNA, 3013 bp, Zea mays
  source 1..3013: mol_type = unassigned DNA
gattgtctcgtgggctcggagatgtgtataagagaaagtctcaatgccacgctcaacacgatccaatgttccttccagcccgtcgccgtcagccttgaacaattgcatgtccgcgagattgagaacggctgcgcacggagcgtcggaatcattttgactcagtttgcgcggcagtgagtaagacctgagccgatcctgcgcggcttcgatttcctccaccgatacaagatccgcccacgtctcaactttcggccttacgcgattcagcttgttccatacgccgccgctggggtttgtcgtcacaccccagtcgaacgagaccttttctggatcctggcctttagcgcggatgaagttgcagaagtcctcatagccccacgcaacctcgctactgatggtgtacgaatcggtcagtggtcccgtgccagatgtggacacaacctcgttcgcagctttcttcctcagccgatcctctagcgctcccaagtgtgacccgccttgagcttttcgcgcatggtcttgaccattgagatgctggcatgatgcccaacggacttgagcgcttcggctatgacggtagggccaatagctagattctcgaccgcctcacgtagcgcttgcttatcgtcatcatcgagcgtggcgtaaatcttttccagcgcgcatagtgtgcggattggctcggcttgctttgcgagtgctgcttttaggctcatggtgtccctctcatgaaaaaggccgccctagttggacggcgcttttggtttatctaaagaatccagttgatattcggaaccgtggtgattccacaacttccgcaatatgcgatcaatgagcaatcaggtctagggtcatcgtcgccgtgatagtcatcatgcgagtaccacggattcatgcagtcccagcagcgtctagtaacgcccatcttcttgatctgccgatgctcgaagttgctcttggattgattgcagtcccagcacatgctcaccaggttgtctgacctatcggagatgaccggaacatcttcagcgaggaatgctgagcgcgggatgatgtgatcaacagcgaaccgcgcatgactcccacagtctcggcaaaactcaccgtcgcgctggtggatgattgcgcgcttcaccgagtcaatcggctctcgtagctcacgattccgaaccggccagcgcttcggagggtcaagcttcaggtcaagctcaccgaagaattgcacgtagtcaacgtcttggcggactctcgatgcgtcgtagtaagcggttatgtcttggatttcagcaatgagtggcatattccctacattccaaatctggctgcttgaccctcgcgggccatactgttgacggatgcgaagtgcggacggaacaccattcgcagattcgcctcttggccgtggcggttcttgcccacgatgaactcgatttccgattccttgtctgacgttcggtgaagcaagatgatgttgtccgcgaatgcctcgatgccgccagactctctaaggtctgacacaaccggcctcgcgtccgtcctgctcgccgaattcctgttgacttgagcaagtgccaacacatggatattgaagtccttagcgagcgccttgcagtctccagcaatgcgcgacacttgccgctcgcgtgcctctgatcggtcggcgggttcgacaagttggagatagtcgatgatgactaacttcaaatcgccctgccgcttccacgtccttacggcggcgcgaatcttggacatgctcatggtcgagttgtcttcgatgtacatgggccagcgcgatgacttctcacttagagcttcgagccgttgcagatcctcactcgtgagtcgtgaggttgtgaagtgctccaacatcactccctgagatgccgcagccattcgcgccacaacctcttcttcgcgcatctccagactgaagaagcccacaccgtgctcggcggcagctacggccgcgcaaccggcaacgagtgacttgcccacagccggtcgagcgcccaccacggttagctgtccaggtttccatccaccgttgagcgtgtgatcaagttcaggccagccggtgttgattccttgtggccgtggatttgtccacacgtctagcgatgacttcagcgcgtccgagaatgtgcgcacgcgaactccgccagtctttgatgcagctcggtcgagttcggagcgagcgttatctaggacttgttcggcggattcccattgcgccgtctcagatgcattggtgagtactccagcaacgtctccgatgcgtcgtaggctcgctagtcctttgacgatttctgcatagtgtggagccgctgcaaccgaggtgatcattccaaggcattggtgaaggtagtcggacttgatgccaccgatgccgtcaccgacaagctggttgctaatcgtgatcgggttgaccggcttgttattgcgccgctcttgggtgaatagcttccagagttgttcgtgggctggctgaaagaagtcatccggattcacggtgagttcatcgagcacacgttcatcgagtagcaccgagccgatcagcgcccgttctgcgtcaagatcaaacctctgttgcattctggcctccgatctttgctagtgcgagttggtagcgctcttcattgtgtttgcgtcgagactctttcatccatgcgacttcttcatggagtgggagaccttcgggtggattcggtttcgtccagtagtccacgccaagaatgctgtccacatcgagttccccagcttcagttccgggggttggcttccatccatccttttcgcgccactgttgctttttgagcatgtcgttcttccatgtggcttcccagttgattttcttgttgccgttctcgcgccagtagagagcgaactctgttgatgcggtgtggacgttgacggctggtgttgtcttagccgcccagatcttcatttcgggagtaatgagaaatggagttgggatcgagtggggttggcttggtactggtgtcgccctctcttc

SEQ ID NO: 524 - DNA, 2534 bp, Zea mays
  source 1..2534: mol_type = unassigned DNA
tactggtctggtaatgcgtgcatcacaaatacaacaaatcaagcgctctctataggcaggtttatatttcgatgtttggactagagtttcaaaaagtcgtgaccgaattgactagagttccaaaaattaggttgatgttccataataaaagaacattacaaatgccactacataccatctaagataattgtccaaacaagtaaaatttacaaacaagaaataaaaatgtgtaataaaaattgaaatcataattttccttccatttagtgtttaccaagaaatgttattggtaaaattgtgacaaaaaactaatgaaaaatcattaataacgggtaacaatcaaagatagataataaaaatataacttattcataaaaaattaatgatatgaaaattgacgattaaagccaccttatttttcatatgaaatttttttaatatttacaaagaaatgttatttgaataactgtgacaaaaaacaaatgaaaaactattaatttttgctaatgatcaaagtcagatactagaaatataacttgtgccttcagaaattaataatcaaagtcacctcattattcatatgaaatattctagtgatagtacatgacaatccaattctacgggtcacatactcattttattattgttttgaacttgtgttaatgatgaagcatgcaaaacaacaagttagatcgatttgtaaaaactatcggtgtaaacaatacatcatttagtgcttcaaaatgatttaaagttaggatatgtctaaaatctttatattctgcaacaaacttgaaaacaattaatattcattagtcccataattttttatgctttgtataaaacgtacattaaataaacaatatttaatcttatgattatgtttgtttaaagtggattaaaagcttacttttttataataaataaacatttcaaatactagtatatacattccgacataacagaactaaacaagcatgatttacaatctgataataaacaaaatttaatgaaaattgggatcaaattttactttatgttaatatttttcgataaatattattggtatagttttgacaaaacattaaaaaaactattaatgttaaataaagatcttattaataaagtcgaaatataaatcgcaccgttagaaaattactgatctagtaaaatccaaaagttggctttaaaaaattttaaattaactcgttcttcatgatcattcagttataaaatatgggattctatttgtttatattattgactttgtcttcaacatttatattacttatgttagccttagtatacatccatttcaattttagatcttccttcaacatttttgttgcttatgctagacttaatataaatcaatttcatttttattttttgtttagcactatttcaacattttttgcccaatatgtgtgtggtggaagtttgttatgttgtatatcatggcaactggtcgggtgacacctcttatatagttacacgtgagcatgggtgaaagacacatgtccccattctagagatgtctccacaaatatctatagagttccacattgcaacaaatattaggctttatagtttgtcaagattgttgtagaagattatagaaggttgcatttaccatggttagccatggttgtttatagaaggttcaagaatgttgcatgtaattgctcgaatcaactatttaataaattaattggcataacaatcattataagaaaataattaaatcttatggactctatgaatgataatgtttaatcctcatcttgatcattttgctcatcaaaatgtttctttcgattaccttggcatttgtaggaaaccttggttccacatccatcacttttgcaatttatattccaatattaatggtacaactcaaaccttcatatatatacttcttaaaatacgagatgacccctttaatctattcaagtgaagcatttatggacataatctgatatagcaatttttactaactatatttatcgaaaataaattttttggtccacctgatggtttgggccctaggtagtcgcccctctcgtctaggtctagagtcggtcctatgttaaaaagttctttatggcaataaaaaggcatcatggttcatcacgattgttggtctccacaatatctaggtgacttcttcatggcaaaaatatctaggcttcatggtttgtcatgattgctatagaaaattatagaagggtacatagatcatggttagccacagttgtttgtagaaggttctagaaagtttcatgtatcatggttagccatgattgtttgtagaaggttctagaaggttgcatattggtcacctatcaaagctcctatgagaaaccataacacgacaacacaattaaattaaaaacactttctccccttgtccactcatgaaaaaagtgggaaacatgggaagaaggttacagaagtacgaatgtcgagagaggcaaaatgtgtaagtggaagagtcatgaaccatgttcaccatctgttatactaccttgatg

SEQ ID NO: 525 - DNA, 3183 bp, Zea mays
  source 1..3183: mol_type = unassigned DNA
tacatgttgcgctttaaacatttataaagttacctcgttttgcatatgtccaaactcaagcgccagcattcatacatcaaatatgttgggcttcaaattcatgcgatagatagtcttgaacttgggttcatgatgaagcatatgaaacaaatgttgtatagagttgggtctacctgtaaaaattgtctgtctaaacaatacaatatttagggcttcaaaatgcttcgaagttgatgcataacaaaaatcaatatattatgcaaaaaacttgcatgttttgaagtaatatgcctcaagttattatttttgttgaactttggttgatagtggagagtgtgaaacaacatgttggatcatttctatataagtaccgattaaaaagtacatattttagggcttcgatacgcttcaaagtagtcacatgcttcattctacaatattctagagataacatgcacgaaatcatgatcctttactcccatactattttttcgagtggcttcaaatgtaggttgatgtgtccataataaagaaatagtacaatgtccactgcaaaccttctaacataacgggactaaactagcatggtttacaatccaagaatgtgcttagtgtaatgaaagttggggtcaaattttccttcatattaatgtttttgataaataaatgttattagtataattctgacaaaatattaatgaaaacctttaattttggatacagatcatagtcacatagtagaattacaacttgcttttgtagaaaacacataatctagaaaagtctacatgttagctttatacatttataaatttacatcgttcttcaaaactattttgtttcttcaaaacggtcgcatgttgtgggttgtcttgtacttacattgataatggagcgtgtgaaaaaacatgttggattctttttgtaaaaactacgattctaaacattacaccatttatggctaaacattacatcatttaggcttcgaaccgctttaaacttacgttgatctccataaccatgaaacatttgaaaaacactacaatattataagataacatgcccaaacaagtattgtttatgatttggcaatgagtaaattataacataattttccatggtttaattgttttgtgataaatatcctgactcccatgctcgtttttggagtgacctcaaaacatgcatttttgtccttaaccaagaaacattgaaaacaacatgcctaaaccagtattgtttatgttctgtcaatgagcaaattgtaattaaaattggaataaaatgttttatatttaattctatagtaatcaatatcattgatagaaccataatagaatagtaacaaagaatcttaaaacatggatggaaatgaaagtcgaatagcataaatatagctctcaactccagaaaattaccaatccaaataatataaatgttgtgctttaaacatttctaaagttacctcgttctacatatgtccaaactcaagtgccaccattcatacatccaatatgttgggcccgaaactcatggtatagatcatcttgaacttgggttgataaagcatgtgaaacaaatgttggatacggttgggtctatctgtaaaaactgttagtctaaacaatacaacatttagggcttcaaatgatccaaaattgatgcacatcagaaatcgatatattatgcaaaaaatttgcattaaattaatacccattagtctcatactcatgttttgagcggtctcaaacatgggttgatgtgtagataaccaagaaacattgcaaatagcactacatatgttttgaagtaatattcctcatgttattaattgtgttgaactttggttgatatggagcatgtgaaacaacatgtttgatcattctgtaaaaactatcgattaaaattatatattttattgattcgaaacactacaaagtagtcacatacttcataccacagtattctagagaaaacatgcatgaaatcaagatcctttattctatactatttttctagtgtcttgaaacataggtggatgtgtccctaatcaagaaacattacaatatccattgcataccttcggacattacgtgactaacctagcatgttttacaatccagcaatatgcaaagtgtaataaatgtatggatcaaattttacttcatcttaatgttttttataaataaatgttattagtataattgtgaaaaaatagtaatggaacctttagatttggataaagatcatagtcagatagtagaattacagctcacgtttgtagagaacccatgatctagaaaagtctacatgttggctttaaacatttataaatttacctcggtcttcaaaccatcaaattctaaggttcacatacagtgggttgtcttgtacttatattgataatggagtgtgtgaaacaacatgttggatccttcttgtaaaaactacgattctaaatattacatcatctagggctttgaaccgcttcaaacatacaatgatgtccataaccataatacatttttcttaacaatacacatcttatgaaataacatgcccaaaaaagtatgatttacagtttggcagcaagaaaattgtaatataattttccttggtttaatttataaatgtttttttgagtcccatactcgtttttttgagtggcctcaaaacatgcattgttgttcttaaccaaggagcatttaaaatagcactacatatgttttaagatagaatgtctaaactagtattgtttatggtcgaacaataagcaaattgtaattaaaattggaatgaaatttttctatatttaattcctttgttataaacatcattgatacaaccataatagaatagtaacaaagaatcttagaacatggatggaatgaagagtcgaaagcataaatatagctctcaactccgaaaaataaccgatctaaaaaaatacatgttgcgcattaagcatttctaaagtttcctcattcttgatatgtccaaactcaggtgccattattcatacatccatattctacagatttccttgaacttgggttgatgatgaagcatatgaaataaatgtcggatagagttgggtctatctgtaaaaactatccgtctaaataatacaacaattaaggcttcaaaatgcttcgaagttgatgcacatcagaaatctatata

SEQ ID NO: 526 - DNA, 625 bp, Zea mays
  source 1..625: mol_type = unassigned DNA
gtctattttcgtatttgcggaaaattggaaacgagacacaaatgggagagggtctattctgtttgtttttacgggatctcattgttatccggattgaacccatatttatcatgttttaagaaatctaggatgagcccaatatacattagtgcataaactaaagcctcatatccttaagtaaaaaaattataacacaagcgatcattctagccactagctctccttaatgacaagtggcctaaattctcaaacaacattgaccgtagctattattacaccactagcaagcaaacaataacggaatgttgtctctatgtatctgtttattttatgttattgcactgcttatcagtcaccaatcaggtatcaatatcatgtgtgcttgtattaaattacgagtttccacttaatattttcgttttcgtacactcgtttacctcgctctcgtttacgttccctactcttttggacccagtcccgtttttggtgataaaatacagaaacagaaacatgaaagatgtttttccatctgtttttatcattacatggcatcatgtggtaaggtggggaagatcaaaagatatagcttggctatgatggaccgagttgctagtgtgaaggacaa

SEQ ID NO: 527 - DNA, 2902 bp, Zea mays
  source 1..2902: mol_type = unassigned DNA
agctaacccacattaattgcgttgcgctcactgcccgctttccagtcgggaaacctgtcgtgccagctgcattaatgaatcggccaacgcgcggggagaggcggtttgcgtattgggcgctcttccgcttcctcgctcactgactcgctgcgctcggtcgttcggctgcggcgagcggtatcagctcactcaaaggcggtaatacggttatccacagaatcaggggataacgcaggaaagaacatgtgagcaaaaggccagcaaaaggccaggaaccgtaaaaaggccgcgttgctggcgtttttccataggctccgcccccctgacgagcatcacaaaaatcgacgctcaagtcagaggtggcgaaacccgacaggactataaagataccaggcgtttccccctggaagctccctcgtgcgctctcctgttccgaccctgccgcttaccggatacctgtccgcctttctcccttcgggaagcgtggcgctttctcatagctcacgctgtaggtatctcagttcggtgtaggtcgttcgctccaagctgggctgtgtgcacgaaccccccgttcagcccgaccgctgcgccttatccagtaactatcgtcttgagtccaacccggtaagacacgacttatcgccactggcagcagccactggtaacaggattagcagagcgaggtatgtaggcggtgctacagagttcttgaagtggtggcctaactacggctacactagaagaacagtatttggtatctgcgctctgctgaagccagttaccttcggaaaaagagttggtagctcttgatccggcaaacaaaccaccgctggtagcggtggtttttttgtttgcaagcagcagattacgcgcagaaaaaaaggatctcaagaagatcctttgatcttttctaccagcacagacgtcggattcacctttatgttgataagaaataaaagaaaatgccaataggatatcggcattttcttttgcgtttttatttgttaactgttaattgtccttgttcaaggatgctgtctttgacaacagatgttttcttgcctttgatgttcagcaggaaacttggcgcaaacgttgattgtttgtctgcgtagaatcctctgtttgtcatatagcttgtaatcacgacattgtttcctttcgcttgaggtacagcgaagtgtgagtaagtaaaggttacatcgttaggatcaagatccatttttaacacaaggccagttttgttcagcggcttgtatgggccagttaaagaattagaaacataaccaagcatgtaaatatcgttagacgtaatgccgtcaatcgtcatttttgatccgcgggagtcagtgaacaggtaccatttgccgttcattttaaagacgttcgcgcgttcaatttcatctgttactgtgttagatgcaatcagcggtttcatcacttttttcagtgtgtaatcatcgtttagctcaatcataccgagagcgccgtttgctaactcagccgtgcgttttttatcgctttgcagaagtttttgactttcttgacggaagaatgatgtgcttttgccatagtatgctttgttaaataaagattcttcgccttggtagccatcttcagttccagtgtttgcttcaaatactaagtatttgtggcctttatcttctacgtagtgaggatctctcagcgtatggttgtcgcctgagctgtagttgccttcatcgatgaactgctgtacattttgatacgtttttccgtcaccgtcaaagattgatttataatcctctacaccgttgatgttcaaagagctgtctgatgctgatacgttaacttgtgcagttgtcagtgtttgtttgccgtaatgtttaccggagaaatcagtgtagaataaacggatttttccgtcagatgtaaatgtggctgaacctgaccattcttgtgtttggtcttttaggatagaatcatttgcatcgaatttgtcgctgtctttaaagacgcggccagcgtttttccagctgtcaatagaagtttcgccgactttttgatagaacatgtaaatcgatgtgtcatccgcatttttaggatctccggctaatgcaaagacgatgtggtagccgtgatagtttgcgacagtgccgtcagcgttttgtaatggccagctgtcccaaacgtccaggccttttgcagaagagatatttttaattgtggacgaatcgaactcaggaacttgatatttttcatttttttgctgttcagggatttgcagcatatcatggcgtgtaatatgggaaatgccgtatgtttccttatatggcttttggttcgtttctttcgcaaacgcttgagttgcgcctcctgccagcagtgcggtagtaaaggttaatactgttgcttgttttgcaaactttttgatgttcatcgttcatgtctccttttttatgtactgtgttagcggtctgcttcttccagccctcctgtttgaagatggcaagttagttacgcacaataaaaaaagacctaaaatatgtaaggggtgacgccaaagtatacactttgccctttacacattttaggtcttgcctgctttatcagtaacaaacccgcgcgatttacttttcgacctcattctattagactctcgtttggattgcaactggtctattttcctcttttgtttgatagaaaatcataaaaggatttgcagactacgggcctaaagaactaaaaaatctatctgtttcttttcattctctgtattttttatagtttctgttgcatgggcataaagttgcctttttaatcacaattcagaaaatatcataatatctcatttcactaaataatagtgaacggcaggtatatgtgatgggttaaaatgcatccaccacagtgggatccgaag

SEQ ID NO: 528 - DNA, 28218 bp, Zea mays
  source 1..28218: mol_type = unassigned DNA
gattaaaacgaaaggcccagtctttcgactgagcctttcgttttatttgaccatgttggtatgatttaaattaatacgactcactatagggtcagtgcggccgcgacttcaagtcacagcgatccctccccgtccgttttttttagcgccgattggagcgagtatggcaaacccaaagcgagcatcgctccgagcagtcaaggacggcgagcaggtagcggctccgaagcctattacttccgtgttggaagctgccgagaatggcaccgtgctggatgagttggagcaaatgcgccgcgttgcgtcgaggcgtattgatgacccgaacacaaacccaacagccctcgccgctctaatgcgtcgtcaaattgagatctctcgggaaatagagacgctaaaacgtcaaaagtccgaggaggccgaatctattggcgcaaccgaagactcggagtggtcagaagaagctatctgaggtagctcgccatatctgccgccccactggaatagtgtccacgggctggccggctgtcaaagagcgcgccgaaaagatgggtatgccctctgatgcatggcaggacggcattggtcgcctagccttagcgaagcgtgactctggactctacgccgctggaattggcggcgtcatcctctcaatccctcgccaggtcggtaagacctacctcatttcgcttatcgtgttctccctgtgctcactcttcccgaatctcacggtgatctggactgcgcatagaacgcgaacgcacaatgagacattcaagaagatgcagtccactgccaagaagccgaaagttgcgccttggattgagaatgtccgcgccactaacggcgagcaggaaataacattcgtcaacggctcgcgaatcctcttcggtgctcgcgaatccggctttggtcgcggcttcgacgaggttgacatccttgttctagatgaggctcagatcctctctgaggacgccatgacggatatggttccggcgacgaacgcggcacccaatggcctagttttcatgatggggacgccgccacgcccacgcgataatggcgaggtctttacgtccgctcgctcagacgcactaagcggcgacgaggaccgtctctatatcgagctttccgctgataaaaacgccaacatcaatgatcgttcgcagctggcaatcgcaaacccttcttatcctcaccgaacaaccgaagcggcaattcttcgaatgagaaagctgctcggatccgatgagaacttcaagcgcgaagctctcggaatctgggatgaaacttcgctcacccgaaaggccgtcaacttcgataagtgggcggctcgttccatctcatctaccgacgttccgcgtgacggcatccgagtttttgcagtgaagttctcaattgatggatctgcaatcggtctcgccgccgcaactcgccccgccaatggccccgtgcatgtggaggctatcaagcaggccccgtcgagcaacggcacgtcatggctcattgattggcttgttgagcgcaaagaaagcaccgcccagattgtcattgaaggaaagtctggagttgggtatttggtaaacgctctaaggactgagggaattccggaatcggtaatcaagaccccatccgccgatgaagctattgcagctcacggaatgttcgaatctgcaatcgcggataacggcattactcatatcagccaacaagcgctcgacgatcaaataaaaccagccgtaaagagaaaaatcggcaacaacggcggcttcggctgggcttcccccgacggcggcacggtcgtcctattcgacgccgtgacgttcgcattctggggcgcaaagactacaactcgaaatccgagaagaaaggcggtgttcttgtgagcacttggactacctcggacatctcgaagatctccatttccggcgttaccgatgctgagcgagacacaatctcggggcttctcagggcatggaatggccgcctagagaagaaccagcgccgcagcctctattacgacggcgaacaagcgttcaaggatcttggactcatgctcccgccgcagctaaagaacgcgaagttctaccttggctgggcgactatggcagttcgcaagctggcgtcaatgagtcagtttgagggcttacgactccccggctctgaggatccgtttgagcttggcgaggtttttgaagccaaccgtttcggtctcgaattctcacagggtgtcacttctgcatataagcacggcgtatctttcgcgacggtcgccaagggtgctcctggtgagcctgatgttcagattcagacgcattccgcagagcatagctcggcactctgggacgctcgacgccgcgcaatctctgcggcgctcacgattaccgacactaaaaacggtagaccgtccgcatttattgtttatcttcctgacgcgattcttcattgccgcttaggtggcaagggaacgtggatcacggagcgcacgaaaaacattattgggcgcaccctagcggtcgcgatcacctatgatccgcagctagggaagccgtttgggcgttcgcgtattactaatccagttatggcgcttacggatatggccgttcgagcctatgtccgcatggaaggcaatgctgagttctactcatcgccacaggttgccattgagggcattgacgctgaggcgtttgacggtgacccgtcatctcagaagcgcttccagctcgcaatggatcgtcttatcgctctcacgcgagacgcggacggtcacgcgccgaatatcaagcaactccagcaagcaacaatggctccacactcggacatgttgcgcacggtagcaatggcattctctggcgaaactggaataccaccggcaagccttggaatcatccatgacaatccgtcatccgctgaggctatccgggcgaataagcatgacctactcgtggatgcgacattccagaacaagtacgttcttggaaccgccgttcgcgatattgcctcactcgccgtcatggtgcgcgatgggctaagcgaaccaccttctgacatgtggcaactctccgcgaagtttgcggaccctgagttccggtcaacctccgcgaatgccgattcttacgtgaagctggcgagcgcgaatccggcgcttgcacagtcccaggtattgcttgaaacggtctttgacgacgatcaggtgaagcgcattcagtccgacgtgaaccgctctgcaattacgcagttagtccagaacattggcgcgaatcgcggaagtgatgcgcagtcaatggtcgcaaccgcagagggttcaaccggcaccggatcggtgactagttaggggatctcgtgacggttttccctattgaggtcactcaaggctttcgcctggttcaagaagagattcgccgcgaagcctatgcgcgattatcgcaattggttgcggctgggattactcgcgagcaattgattgatattgctccggagatcttcggcccacttggcgatcttatgatcaccgcgagcgtcaagtggtacgacgagttgcgcgagcttcaagaggtctccggatcattcgtggcggaaccgcttgagtccgtgtctcgctcgcggtggcactccttggcagggtatggcacgagttcggttgcacttgatgaggtcgtggacgctgatgcgtttgggcgtattgcgggcgggctgacatgggttctcactgaggcgtcattcgacacaattattggcaacgccgagattgatacaaccccggttggataccagcgcgttccgagtgccggctgctgcgcgttctgcgcaatgctcgcgtctcgtggcgctacgtatggctcctacgagtccgcaaaaacggtcgtagggcgtggaactgagattccaaaggttcgacgccgtggcggtcaagcaaagggcatccgtccacgcggatcccgccgactcggagacagctttcacgactattgccgatgcaccgtagttgcggtgcatgagggcaactctttcaagctcgaacaggacgcagatcgctactacgagcaatacagcgaatcagcgaagaaggtttctgagggtcaagagtggattcctggagagcgtgacgctgacggtaatcgcaccactaaggggcgatgggttgacgctgacggaaaaactcgctccgacaaggaaaagaagcaacagatcctcgcttcaatgcgctccgaattaggaatgcgctaacaaggttttcacggcccaccgtgaagcggcacgcacccgttcaagtgcggtcaatgatgccagacgtggctaaacggagaggtgattcggcatgcccgatgcagtaaacaacaccagcacggtggacgaacaaaccactaacgccgttcaggcggacgcggtaaccagtgctcaagaattcaaggctccttcttcacaggaagagcttgaccggatcattggcgagcgcgttgcacgcgagcgcaaaaagtatgagggatacgacgaactcaaggctaaggctgagcagttcgagtcggttctctctgaaaagtctgcactcgaaaacaaggttgctgagttcgaagcgcagtctgagcgcaatggttggctcgctgaaatctccaaggaatacggcattgcgccagacgtcctccgaggtggcacgcgagacgaactagttgcccatgctgagcagttgaagtcattccttgttccacagtccggcccagttattcaagggcaagaaaaagttccagcgccaattgaggcgagcgacgaaatcaaggccgtccgctccctgtttggcgcataaaccgaaaggtaaatcatggctattttcagcaccgctgaagccaaggttctgctcccgcgcaatatcgcggacggcatgatcaaggaaacccgttcactttctaccgtcgcaaagctttcaggccgcgagcctatgaagttcggcgagaccgattacatcgtattcaacgacttcccaaaggcggagtttgttgaagagggtgccgacaaggcgagcacgagtggcggcttcagccccgttacggctaagcctcacaaggcgcaggttacgatgcgcttcagcgaagaagttcagtgggcatccgaggattaccagctgaacgtctttagtgagcttgcaagcgccggtcaggaagcactttctcgcggcctggaccttggcgtctaccaccgcatcaatccgcttaccggatccgttatcaccgcctgggataactatgttggcgcaaccacgaagcgtgttgaaatcgccacggctgacgctgatgcggatatccgcaccgcagctggcctgctcatcaattcggccccatcctggggcgtaaatggcatcgcgattgaccctaagtttgcttgggcgctcgccgacctccagaccgagaatgcagacggatccccttctgggtctcagcgctacccgaaccttggactcggaacggacatcacctcgttcgcatccatcccagcagctcagggcaacaccgtatccggcaccccggaggcggttgatacgaaggttcgcgcaatccttggcgacttccagaacggcatccgctggggtattcagcgcgagcttcctgttgagcttatccgcttcggcgatccagacggtcagggtgacctcaagcgcaggaaccagatcgcacttcgcctcgaagttgtttacggctggtacgtattcgctgatcgcttcgctgttatcgaagacaaggttgcataacttgcctcgcttcaaaaataaggtaaccggctccattgtgaacgttgacgaagagactgcaaagactctggatcagacgttcgtaaaggttgtcgaaaaggcatccgcagcttctgagaaataaggggtaagtcatggccgacgtaacgcagtttgcgacacttgctgagcttattgagcgctggccagactttcccgcaggggctgaggatcacgccaacgtgttgctcgctgatgctagtcagttcattgtggacaccgttcccagtgcgctggccgcatcggcgagcacacttcggcgcatcgtttgtgctgtcgtaaaacgtgcaatggcatctggcgacatggctggcaatgagtcggtccagtttggagccggcccattccagatgaccgccaagccgaccaatccacacggcgacttctacctaaccaagcaagagcgccgcgcgctgggtgaggggcgtcaaacggcgttcggggttcagatcgcgtcattctatgcggttattcatcgtccttggtgcaatctgaattttggcgcgctctactgctcgtgcggcgctgacattgcgggggttccaatttatgaataaccgcatagtcacccgtttccccgcctcatggcgcacctcgtttacgattcttcgcggcggcggtcgcgacaagttcactaatccgcttcccgaatccgagattgaagttccgcatggtctaatcgcgcctcgcgtctcgactgagcaggacgacttttcggatctcgcagacgcaaccgccgtgctgtattgcgatctaacgcccggtttatcgttcttgaacactgaccggatacgcatcccagaaggctcgcgtttggctggtatttggtcaatcgtggggcgtcctggtgaatggccgtttggctgggaagtggggctaaagaaatgaagctccagaagattcccggcgtcaagagttaccgctcgctgaatcagggcttgcgcgttcttggcgcgtctagcgagatcggcaaggcgactctagaggttgctgagggtgttgcgggatcggctaactcgatgggtgaagcggagtattcagcggtgcccacgtcggttcgctttggtcgcaacaatgaagagcgttctggtgcgtccgtgcaggtgacgacgcagcattggcgcgacgctcgcgatcaggttcttcttcgccttattcaggttatgaaggtgagtaagtaatgtacgacgctctcatttggcctgacatccgcaaggctctcgtgctcatggtggacggcgaggaacacgctggttcagtcatctacgcagctcagcatatggaagttgacgctaacggaatctcacatattccgctcgcgttattcctcgattcggctggtggaaacatcggctatatcgaccgtgccgaccgtgtgctgattgaggtttacgcgccgggcgagcttgcaaagaagatcctcgaaagcatcatcacctcattgtgtggtgacggcatcgaggggcctgacgtgttcttcgattccattcagtgcatcgtcccgcctactgaatcgccttacccgcaagacactctaaatctagcaacggcggtcattgagactatcgttcgcccgctcgactagtcgcccacctttcaccccactcggggtttctccacattgacaccctcgaaaggggttatttgctatgtccacagtagaaactgagcgcaaggacttcgactcccgcgcactcgttcggaaaactacggtaggtctcgcgtgctttgcacctaagactgtcgagcttccggctaccctccttacttctgcaaccgaaatcgcagacctgtccacgctgggcttcattcccattggcatggttacccgcgacggttacacgttctccggcgagatcgaaaaggaagacattgacgcacttggctattacagcccggtccgctcggatgttacccgcgtaccgcgcaccgtttccatgacgcttcttgaatccggcaaaaaggccattcaggaactcgtgcgcggtacgaagatcaccgaaacgcagtctgctacgactggtgaagttgtcttcgatgagccagacctcccgaacttcgatgaagtccgcctgatcgtagtatccgctgacggcccactgtccaatcactggatcgaggggcgcggattcttcgccgcaaagatctcatcccttggcgaagagacgtgggcgcatgaaggtgctcaccagcgccaagtgacgttcgacatcttcaatgatgacgtcgagggcgtcccggttcgccattacttcggcggctccggcgcgattctcgctaaggacattctgggatacacccagggcgcctaacccctagttgtggcgcgcacgtccttgggcggctcgtgcgcgccgcttttcattgccgccccacgaaaggtagtcatgcctactttttccaatggtgcccaaaaggtcaccgtaagcaagccaacccgcgcagaaattcagcgactcaaggcacttggattctttgaagagaagcccgcgccaatcgttgaagccaagccagtaaacccatctaagtaaaggagccagtcatggcagccgcccgcaagatttcagataagccagcaccacgtcacaccatcggatccattatcaaagacggcgaggacgttgagccatatgtgctcgtgctcgccgatgggtcagagatcacctttgtttctccggaagaactcgaagctgagtcaggtgttcgactgctccgagctgcgacgattcgcccgcatgagttgtgggagattcttggtgaatggcttcccgaagaagagcttcgattgattcgcaagcagaaattcacgcttggtcagattggcaagattctcgccgctgtcaagactcactttgaggacttcttcggcccctcgggaaactagaacgcctcgatgcgctcttagaacggtttaggccagagatccgcgccgatctcgcacatgagtacggcgtggatctctcattgttctatcagcgccgcaggtacgtggcattgctggatctcattgatcagctcccgcgcacctcgcgttacttcgaggcgatgtccaaggatcctgagtttattcaggcgcgtctagagattgaagaatctcgcaccgacgacgaagaggataacactccagagtggcatccaagcatcacagagtttggactcactgagcagctacttcgcgagcttctgcactcaatccaagagggcaacatgatcgccatgcgtgcagctggtggcaagcctccgaaacctaagccattcccagcgccgttcgatccactcgccgaagcacgcgctgatcgcgagattgagcacgtcgcgggactcgctgagatgtttggcttcaagcgctctgacgtcactctaaagccgccaaaaaactaaatcctttaagggggtcgcatgcctactatcggcgttgctgaggtactgattcgaccgtctttcaaggactttcaaaaggaagtcggcaaggttgttgacggcacctctaagggtggtcaagaatctggcaagagcttcggctccgggttttctggtgccgctaagggtgcattgcttggcggtgctgcggctgcggctggcggtttcgcgttggcactcactaagggcttcggacgactccagagcctagagaatgcacgcgctaaactagccggcctcggtcacgatacgaagaccgttgagaccatcatgaatgacgcgctgaaatccgtaaagggtaccgcgtttggcatggatgaagcggccacggttgcggcttcggctgtggcgtctggcgtgaaacctggcaaggatctagagcgcacgctcaagcttgttgctgatgcttccactattgccggcgttcccatgaatgaaatgggcgcaatcttcaacaaggttgcaggtaccggcaagattcagggtgaagtcctcgcgcagcttggcgagcgcggcatccccattctccagctccttggaaagtccctaggtgaaacccctgagtcagtccagaaaatggcatcagagggaaagatcggcttcgaggatttccaaaaagccatggagcagggcatgggcggcgctgctctcaagtctggcgacacgttgcagggtgctttcaataacacgctcgcgtctatcggccgcgttggcgcaaacctcttgagcaaggtttacccgaagttcacggagttcttcaaggggctgctcaagcttctggagccggtagaagagtgggctaaaaaggctggcgaggctattggtaaattctttgacgaacagctcgtgccattctttgcagcgctctgggattggctcggtaagaatacgccgctcctgtggtctatcgcgggcgctgcggctgcattcttcactggtcttcttatttacaagacggttacgggaattattggattcttggcggctgctcgcgtcgcattcctgaaactcaacgcggcaatgctggcgaatccgatcttcattgtgattggtcttatcgcgctcctagttggcgctctggtgtatctctaccagaccaatgaggacgctcggaagttcatggatgaagcgtgggctggcattcaaaaggtcatcaagtgggcttgggagaatgtcattcaaccggcattcaaggccattgtcgatttcgtgatgaacgttctcattccggccattgtctggttctggcaaaacgtgatcgtcccagcttggaacggcatctcggcagccgtgaaatgggcctgggagagtgtaattctcccagcgtttagggcgattcgcgacttcatcaacaacgtcctagcgccaatcttcaaatggctttacgagaacattattcgtccagtttggcaggctatcgtcgcagctgtctctatcgcttggggcattctggatacgatcttccgaaccattgtatgggttgtgaaaaacgtcctctcaccagcctttacatggctctataagaacatcatcaagccggtttgggacaaggtttctaaggtcatcacggatgcgtgggaagacgtcatccagccagcattgcgcgagttcggtaacttcttccgcgacgttcttgagccagcgttcaaaaagggcgttgatgcgatcaagaagatctggaatggcatccagcgcatcgcagcggctccaatcaactttgttatcggcaccgtctataacgatggtctccgcgttgccctgaacaaggttcgcgagatcgtcggcggcgacgcactgccacgacttggattgattgacgtccccgcatacgccactggtggacaaatgcgcaacggctggaagctcgtgggcgaagaaggccccgagcttatccacacaggccccggctacgtctacacggcgaacgagaccaagcgcatgttggcatcacaacagcaagcgccaatggatgcactcgatacgctcaacggcggacgctccaagaattccccactgccaatcggcggctggctggaagagcttggaaacttcgggcgcgacacagtgcgcaatatcggcaacggtctcgactgggtgcgtggcggactggcagatgtggcgtcaatgctactgaatcccgtcaaggacgcaatcaagacgctcctacctggagagaatgctttcccggatattgctcgccgtgcttcgacgggtgcaatcgacgcggccatttcatggattcgcggcaaggatcagatgaccggcgatttcggcggcggcgctggtgggtacttcggctacgacggaccgcttggcaacttctaccgtcctcgcggtgtcatcacgtccggctttggtacgtctcgtggtcgttacccgcacgcgggcatcgacttcgcaagcccagtcggtacgccattccgcgcaatgtacaacggcatcgttcgcaaggcgggctggaacatcgttgcagggcgtacaggtattggtcagctcattgatcacgcgaacggcatctctacctacgtgggccacctttcaaaggttctcgcgggtgcaggctctcgcgtcaagggcggccagattacggcgcttaccggcaatacaggtaagtccaccggtcctcacgctcacgttgaaatgtggaagaacgggcagccgttcaactgggctggatacctccagcgcggtggtggcggtcccgtcaaggcgttcgctaatggcgggcgcgcttccgggtggtctctcgtgggcgagcaaggccctgagctggtgaatttcagctcccctggcaatgtgttcacggctcgcgattcggcaggtctcacggcacttctaggcgctctgagcaatgtcagcaactcgcagagcttcgacgcaatcaatgcgtctctcgcggcatctcgcacaccgtcacggatggaactggtactcgaaaacggccagcgcctttcgggatacgtgcgcgaagttgctggaagccaactagacgaactagcgcgtgacgctcgcagggttgtccgcgcacgataaggagctatcttggctatcacttggggcgcatctaagactggcggttctaacggtattcggctgggctacgagtttactcaaagcccggccaccgttggaaccggcacatcttcggttacggtcacactgaagctgtatgtgtggactatgggtcctatctcggattcgactaactcgctcacggtaagcggcgatttctcattctccggtagcgtctcagtttccacgtcgtcgggttcacagtggtctacgtctaatcagcagctcatcaagacgatcaaccgtactttctcgccactgtatggcggcgcggttacgtctagcttctccggctcactgagtggcattgaggctgtcggcgggtccgtcacggctacggcttcaggttctacgacgacagccaagcggccaccctacgcaccggatgcgccaaccgctgtaactgtagctcgcacggattcgacgcggcacacggtctcgtggacgcgcacgaatgccacggatccaacgaagatctatgacacgcaaacgatccagcgcgcagacgttctaggctccggctcatacgtcacgatctccacgctcgcgggttcatcgtcgtcattcgtggacacttctacggtctcgaataagaaataccgttaccgtgtccgcgccaacaatgacagcggttcttcggcgtgggcttactcgcccaccttttacaccgcgccaatctcgccaaccgatgtcaaggccgcgaagtctggcggcgatattgccgtttcgtggactcgacgcgcacatgtcgaagcgcgctacgaggtcgaggactgggcgaacggtgttgcgacaacgccaacgattctcacggcggcaaacgcggcatctactgtcgcaacggctcccgatccagctaagacgcacgcttaccaggtgcgcgctttcgttgacgatgcaacctttgggcgactctattccgtctattcggtgcaatcggccacggtgcaacttatggcaccgccgaacgcgccaacgaatctcgcaccaagtggcaacgctgcggatggcgcaaaggcgatcacgctctcatggcgtcacaatcccgtggacaccaccgcgcaaacgtactactcgctacgtcaccgcgccgtgggtgcttcgacgtggactacggtcgccaagacggcaagccctacacagtcccgcgcgctcgcggctggaacctacgcgaacggcactagctttgagtggcaggttcaaacgtggggcgatcatgctaccggctccgagtggagcgcggttgctgttgtgccactgtccgcaactcctatcgcgacgatccttagccctgaaacggttctaggatccaagctgaccgctcaatgggcttatgcggatccagagtcaacgaatcagtcagcttatcgcgtcacgctcattcagtctaggcagactctcgaaacatataccggatcaggttcggcatcatcgcgagttcttgcaacgcgactcgataacggtggaacttatacgctcaaagtcgccgttcgcgacggggcgggattgtggtccgcagatacttcgcaggtgttcacggtctcctatgcgccgccaccatctgccacggctacggctatctatgacacttccacaggcgcggcggttatcgaggtcaccattcccggccccgggtctggcgaagtggacgcggttacatggcacctagagcggcacactggcgcgggtgattgggttgcggtcactaactcaatctcggttactccaggtctttccgagtctgttgttgaccagctcccggccgtgaatgctctcaatcggtaccgcgtgatcacgacctcagagcttccatccacggccacatcggcagaagttatcctcgacacgtccaagcatcggggtttcgtctacgtcaacgccggccccggattctcgcaagtgatcaagtttgcagatttcgccacggcttcggtcaacgcgacacgcgagcgggtattcaacaactttgcagggcgctcgtatccagtagctactaccggcgagacgcgtgacaagacagttagcgtttcagggcgactaggggataactcttctacgccgtccgaggttgaagcgcttatggatctcgcgggaaccttctgtgtgcgcgctccttacatgaagcaaggcgcgggcgggaatgttcgcgagtttgtgcagcccaactctgggactgcactggaatttgagcgcatcaagggcactgtctcactgagcttccgaaaggtggatttcattgagtagcgtcgtattttcggatcttattgaccgtcggacttatgacgcgcttactgaccgccacgaagaattctggacgtatcagcgactcgatcgaaacctaaacctcatcgaggaagtggatggggttgacgcgtgttcggtcgatctgaacttcaattcggatgtgcgcggctccggctcattctcctaccttggctcaattgactggcgtaagggcaacttgattcgcccggtatacacagtcaaggctggggattctgtcgcgtcatggccgctgggtgtctacgtcccaatgtcgccgcaacgcaagcatggcgctacgggttcgccgtgggaatttcagatgtacgaccgcatgatgctgttgcgggacatcaagatgagtaacacctatacggcggcaaagggcatcaacgccattggtcgagtgaagtacctgctcacattctggggcttaccccaatacgtgattgacgactccgatgaagttttgcgcacggcgattacatgggaaccaggaacaacggttctgcgtatcgtgaatgatctgctcgctgccgtgaattacttttcgatctacgcggacggcaacggctattttcgatcacagccatatcagcggccacaggatcgagcggttgagttcgggttcattgacgacgaaaagggtatctacgcgccagagttcaccgaagactatgacgattacgcagtgcctaaccgcgttgtggtcgtctcggagggcgacagtgacgctccggccattcgcggattcgcgcaagacaatgaccctaactcgccgttctccacggtgacaacggggcgcattctcacggcggaggtcgagagcgtagagctgacatctgagactgtcgcaatggcctacgcgaaacggcgacttggtgagctgcaacagatcacttccggcttcgatattgagcacgcgccgatcccactagttggcggcgatgtggtcacgttcgccaactcgactagtgatatttcaattcgcgccgtggtgcaaaaggtgtcctactcttcggagcttggcgcactgtgcagcacgactcttcgggaggttgtcggtgcgtaatccactagctgacattatgcccgcaacgtcgagcgcttcggattcatggattgaagcaaccatcacgcaggtgtcgccgctcaaggtgcatctcattacggacgacgatccatcggacgcggaacctatcgcactcaatgacacgccactcgcggcaggtgatcgggtgtgggtgcagatgcgcaaccgccgcttgttcattgtcggcctcattacgccgcgtgagacctccggaactattgcggggccagcgctcacatgggcgtctacctactcaccggcgtacgtggcaacggcgaacgtctcgacgccctacgcgccaccagagggttacggcttccaggtttacacgatccaaacatctggatgggtgtgggtttcggttgcctcgcaaacagagtcaaccgtcacgcttcgagtctttacctacgacacagcaacgccgccaagtgaccttattgtcacgctcggctggcgattagtacgaatctaaataaggggagttgtggcatataaccattacgcagaactagtggtggcagactccactaccgggcggccactcgcgaatcaggttgtgaaactgcttgacttcgagactggcgcagaagttgacgcatatcgcgacgaggtggcaacactccttgtttctggcgcaaacggtctagtgaccccatttcagacattagataccactcgccgcgtgaagatgatcgtcggtggcgtggagtactcgcgctggtgtgacgagatgatcctccaagtcggcagcgcggtggatgagctcgaacggctgacggtcacaaatctcgccattgatacagacggcaccccttatatcagcattgggtcaactggcgctcgcatcctcgttgacacagacgggacgccctactttgaacaggtttagcgcaatggaacacaaaaactttatcagccttttcgagctaggagcctagtatgcagacaccagatgtacgactggtcacggaagagaagctgactgaggcactagttggcgtcaccggcgcaggcatccccatcttcgaaacccttgctgaggctgacgcttacgaggcggcgaacccggggaagattgcgctgacgcttgagccttcgacgccggatacgacggcccctgttgcgggtaccttgtcggggacggtgacgcataattcggcggcgttgtctgtcgctggtgcgtctgatgatcgtgtggtggcggggtatgcgttcaaggtgaattcgggtgcttggtctgcgtggcagtctggcagttcatattctgcgacggggcttacggcgtctacgtcgtatacgttccagcataaggtcaaggacggtgctggcaatgagacggtgggtacgtcgattgctaagactacggacgccatgccagttacggttcctgtgggtgattacgacaacgctgttctcgcggatagtccgttgcattacttgccgctggatgatgctgtggggtcctccactgcccggaatcttggttctgcgggcggcacagttgcggtgactggattcacgtttggtgctacgggtattggtgacgcggcgacgtgtgcgactttgacgcagacgtctgtgacggccagtatcgcgcataatccttcgtctactggtgcgacgtgggagtggattatgaagccgactgggtatccgactggcggcatgaagatactggaatacggcgctgacgcttttgtgatcatgtatccagagaatgacggcgttcaccccgcaggtcagatcgcgtcgtacttcaagaacatcatctcaactggtgccacgacgctcgaccagcgcaagcatgtggcggttacgtggactagcgcgggcgtttcgaagttgtatatcaatggcacgctggttaatacggcgaccgcggcggtgcccaccatgacgtcgttcgtgttcggcaagatcgttgggcaggttgcagggtttgcagtaacgaattctccgctttccgatgctcggattcttgctcacgctcaagcggcgggggttgcgtaatggcgaatatttacagcactcaggggaatctggtgactgtgtaccggacgagcggcgctttggtgtttggtgattccgagccgcccgttgagccggaaccgtggacgcctcccgtgtatgtgcagacggttcggcaggcgatgaaccgtactcgccccatgaataaccgatatgggggtgccggggctgattccacgacctctcttacgtcgcgacgtaagcacgtggtgtatggcacagggcaagggttccgtctcgtcttcaataatcttggcgggctcagtgtggggccgagcccctacacggtcaaggtgacctttgagacgctcgctggcgcgctgattccgtttacctttggcggcgccagttcggctgtcgtggagccgggtgcgctagtcctgaccgatccgattgacattactcccggagagtactgggtgcgaacgtttgcatctgtggcagaggggaaccgagttccttgtacggtcatcgacgacgcgcaccggactggtgaggctgtgtctatgaatgtagacctgaccggagtgacagggccgattacaaagaatatcgcgcagggtcctgcaccttccgccgcgatagagactggcaccggaattgcggttggcgtggttggcgactcggtatctgcgggagcatacgacatcatcacagagcatggtgcgttcgcccgaggtcttaccgcagccggagtgccacacgtcctctggggagttggtggatctaatgccagccagaacacgacggcctactttgactctgtggcgctaccagaccccggtgttacccatgtcatcgtcgagcacgggctaaacgcgtcgtcgttcggggtcaacacctctaagacatatgaagtcgatttgtggttcaggcttcaagcgcggttccccgtcggtgtgaagctctaccagaccacgatcaatccatacactacgtcaactgactcatgggctaccgtggaaggacaaacggagctacatcctggcgtgcagggagcgtataactcgtggatccgcgacgggtgcccgatcaaggacgggttgcacgccgcggttggcgacagcaccgcaatcagggctggcgaggaaggccacccactggcagggtggatcgagttcgcgggaccggtcgagtcctcgcttggatcgaaccgttgggcagcaccgggcggcactcaactaactaacgacgggcttcacccgaacggcgaagggttcgctctaatggccggagcagtacaagcgtgggctgaagggcttagcgcctagtaggcaatatccatctggtagtccatagcgcatttgccggagcagaagtcagagccgggagccttcgaaagttcgcggcactggaagcacatgtcacgaggcacttccagcttccatagcatcacggcccgacgcaagagagtcatcatgtgactgatgctactcgccgcagcacaaattacccagaggagtccatcatgtggcgtgccacaatcccacataggaaaaagctatgatccgcacctatcatccgatctatacgccgccgaggtggtgggagcgtatcctcgtccatccaatggagaacgccctcgcagtcctcgcaatcgtattcggcgtcgtcatgtcagcaagtatcccgatcgaccatttccagccgtccccagcaatggcggatatgccgtggccgctcgtggcaatctgcgcggggttcattggccttggtggagtgacgagcgtgatcggcttgcactggcatgactcgcaagctatcaacagggcgtgggggattgagcgaaccggatggatactctcagcaggcggcttcttcgtctacgcaatcgccgtcgccattagctacccaaactccgtgttctcatggctcgtacctgctggactgggcatcgcctcatccctacgcgcaatctcgctactcgtcatatggctggtggcacgcagaaagctgggggtgaaatgagtgagacgctaatcatctccattgtcgccggcatccttacgatctttggtggcgcggggttttggagctaccgggcatcacgagccgaaacgccactcaaacaaggcgcgcacgatcttgcgctggcggcgggtgcgaaccagattctcctaacctcactcaagagtgttgaggatcggctcgaaaagcaagacaagcgcatcgacatcctcgaagctgagctagaggaagagcgcaccgagcgcaagaacttcgctgaccggctcgaacgctgggcgatctggtatcagcagctcgcggctggctgggaagtccaccgccagaagccaaacgcgccaccatcaccggacacactacgcacctgagagggtgctttttattggagtgagacatgccatatttcacaggactagcgagggtagcgcgtacaactggctaccccgtgatcgaggtggacggctgggagaagcgcggacacgggccaatgctgggcgcgaaaaccatcaaatgccaccacacagcgggtggcgcaaacgggaacttcccatcaatgggcaccgtgctcaacggacgcacggggctatcaggtccactgagtcactacggactggggcgcgacggaaccatctacgttatcgccgctgggcttacctaccacgctggcgcatcacgcacagttgaagagggcaactcctactcaatcggcatcgaggcagagaacacgggcgatggaaccgagccgtggggagctaagcagctcgactcctacgtgaagctctgccgagcacttattgacgaattcgggctggatgtctccaaggtgcaaggacacaaagagaccgccatcccccttggccgcaaacctgaccctcgcggcattgacatggacgacttccgcgcatgggtcaagcgcggctactacatcaaagcaaccgttacaccaacttccaccaccgcaaaggacgaaatcgacgtggcaaccgtagacgacattttcaagaagctcgctgagttgaagacggctattgacgcgaaggcgtctaaggctgacttgagcgacattcgcgccgacgcagctaaggcggcaacggctaaccaggtgaactctgtttacgttcgccagcgtgagtatcaggccgcaaccgatgaacagctacgacagctcgccaaggcaagcaacgtagtattcgacgccgccaaggtgcaggaagccgcaaagatcggcgcaaagctcggcactgaggaagctattgcaagcggcttcacagtatcgggcacgacgaccgttgaagtaaaggcggctgagtgatgatcttcactaaggcattctggatgggagcggcggaacgtgcgatcaagaccttcttccaaactttcgtcgccgtggtcactgccgcattcggtgtaaacgctatcggcgttagtgccgcactcggtgacgtgtcatggctgaacgcgctgtcaatcgccggactcgctaccgtgctatcgctcgccacctccatcggcaacgctgaattcacggctggcacgagctacgacggcaagcacgtggacattagcgagtagactgtaatcactatgactcgtagggccacatggcacaccgcgagtcctcacaaagacccccgctctccacttacggagggtgggggctattcgtgtttttgtgctaaaccaaaggcagccccggagagtgcacgaacactcgacccggggcctgatcactaacactggaatggttctgtagtcatgcgcctaaaagtgacctataagcatccttatacgcacttccgtgtaaaataggggcatggaaacagaccttgtcgagcagttcatccactgggccgagcgagaccgcaaccgctcgcctcacaccatcgcccgataccgagccaccctgaaacaactagcagacccaggagccgcgacacgcgaggaggtcgaggcgtggtgggcgagccgatacgacgccgcaccggccacccgagagaatgaactagcatgcctgcgatccttctaccgctgggccatgcgattcgaccaccgagacgacgaccctacccgccggctcgacgcgccgaccgtccccaataagatcccgcgcccaatcgccaaatctgacctagaacggatcatcggcccgctcacggtagaccacctggaaatacggcgggcagtagcgctcggcgcatatgggggactccgagttgcagaggtcgccgctctcgactggtccaatgtggacatcgaatcccggcgcatctacatcagaggcaagggggccaaggagcgcgtcaatggcctgtctgcggtcctccaggacattatcgcgccgaataccggcgggaacgtcgttacggccgggggcgggcaatacagcgccgccgtgctgcaacgcaaggtgaaccgatttatggagcgcaccggcatcaaccagaccttccacgacctgcggaagcgaggggcaacccaggcaatggccaaggtccgcaacccgcaggctgtagcgcaggcgttcggctggtcatccttgcagaccgtgactcactatgccgtcgtaggagacgagacgctggatgaaatcgccaacgccatgatctagccgttgtaggtttcctacagacttcgaccggcacccgtatttcagttgacaggtttgattaggtttggataggttctagtcatgaacgaaacaccagaacaactaacgatcggggaggtcgcccgagtgctcggcgtcacagttggaacgatccgacgctgggaagcggagggtaagatcgccgcaacccggacccctggcaaccagcgtcgatttgaccgaaccgaagttgaccacctccgcgacgccgcctaactccggcaaacacccccaagcagtattccgactgcgacccacgggtccagcgcagataaggagtctaattgccatgcccgaaaacgaattgtccacagtaactggcttcaagaatcgcatcatcgaggcaagccctggaatcaacgaggaatacgccaagcgcgttgcgactcgcctaaagaaacgcatggaccgcatgaccgaagagttcgacttcttcgccgagctgcggatccttggaatcatcagtgacccaacggcgctaacggctgtgaagaatttggaggccgccgcatgacccccaccgactacccacccctaacccacgtcctcgctggcgtgggtttcgtttttaccgtcattctcgcgccgtgcatcgcggcgtgggcactctgaaagggagagttatggaaaaggaaattaggccagaggacatccgcgtcggtgacacgatccggcgcgaatgggtgtatctcgacacgaggtacacatccgagggcaaggttaccgcaatcgacgctgacggactctacctagaggttggcagtgggacagtatggacgttccatttaaataggtacacatgtttcctcgtgcaccgtccaacgcctaccctgccaaccgagcccggctcagtgatcatcgcaacgaaggtgcgcggcaaagagggcaagtggcgattgatgcgcgacgtggatagtgattggatttcgcccgagcgcatcctcggcgctcaatttcaccgcgacaatgacatccaagaatggctaccaaccgaaatcttcgaggtgaccccgtgagcgacaacctcaccgtctaccgcgagctagagcagaacacgccagaatggcttcaagcgcgtgccggtatcgtcaccgcgtccgtcgtagggcaactcatttcacgcgagtcagtccccgctatcaactacgactgcccggagtgtggagcgctcgcattctcgccatgcctaagcaaagtaacgaaggctggtgctgatgccaaggaaatcaagacgctccacagctcgcgcagctctaaggcacgagagctaaacgaaagcgtcctcacgttctcccacggtgatacggcaatgtcactcatcgccacaatcgctgccgaacgaatcacgaagcgcgtcgtccagatcatccctagccgcgcaatgatacgcggaacacttgatgaaccattcgcaagagaggtctacgcgcaaacattcgcgcctgtcgaagaggttggcttcatggtgcgcgacttcggaaacttcaagcttggatactcgccagacggactagttggcgatgatggcctgattgaaatcaagtcacgcgagccgaagattcaactacaaaccgtcattcgcgacgaggtgcccgctgagaacatggcgcaacttatgaccggcctactcgtgactggccgcaagtggattgactacaccagctactgcggtggaatgccgctgtacgtgaagcgcgtctacccggatccagcttggttcgaggcaatcactgacgcggtagatgacgctgagggtcacatcctcgcgtgcattcacgagttccaggatgcgaccaagggcgcaccgcctaccgaatacatagaccattgggcagaaatggagattgagttctaatggatatttcgagcagcatcatcccgaaaagcgaccaaattaatgccgatgacctggttgcaggtccgcgcactgtgaccgtagcaaaggtgagccaaggttcaccagagcagccggtcaacgtgcatatcatcgaggatccaaagcgcgcataccgacctagcaagtcaatgcgccgcgtgctcgctgaaatctggggcacgcaatcagataactgggtgggcaagtctctcacactgtttcgcaacccaaacatcaagttcggcggcgagacggtgggcggcatcgagattagtcacatgtcgcacattgataagcctgtgactgtttcactcacggcaactcgtggcaagcgtaaaccgttcaccgtgaagccgctcctggttgcgcagacgattgattgggcggcagtgattccaacgaagaacgccgaagagctccgcaacatctggcagaccaaccccgaagctcgcgagcttatcgaggccgaggttgcgcggcgcaaggaggaagagtgaacttcccaaacctcgcacgacttgaaaagtatcacctagaagatacaagtgcagacgaaatccgagaaacggacatctgggacctagcagatgccgcatacgacgcaatgaaagaggagcagtaaatggcgaacgaaaccatcattaccattatcggaaatctaacctccgatcccgaactacgattcaccccgtccggtgccgccgtcgcgaactttacgatcgcatcgacgccacggacgtttgatcgccagtccaacgaatggaaggacggcgaagcgctattcctccgcgcttcagtgtggcgcgaatctgcggagaacgttgccgaaaccctcaccaagggtatgcgcgtgatcgctcaaggccgcttgaagtcccgcacatacgagaccaaggagggcgaacgccgcaccgtcatggagctggaggtcgaagagattggcccatcgcttcgtttcgcttcggcgaaggtgactcgcgctcagcaaggcggtggtcaacgctcgcagcaacagcccgcgaatgacgcgtggacgaatcaatcccacgccgaatcaaccggctgggaagttgttggcgccggcatgcatggatccgatgggccgccgttctaaacctgtacataaacacgtacagagccttgtatcccgcaaaacaacccccgcgccttgtggcgctttttttatgccgtggcgcgctcatgacgggcgcgccattggcgtacctgagaggacatgctttgaatgagattgacgaagatgcacacctcgcactgtgggtcgatgaagtgacgtgcgaagaactgaattacatgtacgcacgcggtgggatcgcttatcccgtgagcggcgacttcatcacgacgggccgcatcgagaagcgctggagctttaccggtgacgactaaaggccatgtgccagacgcgaatctggacgtataccgagcgctcagggatgcacgtgatgccatcgagcggtactggcgcatacagcgcgtctcgcacgcgacggactcatatgggttgcggcaacttagcgaatccatcacgggcaccatgaggaccctacgcgttgacgtcgaggatccagagtgacttgcgacggcgagtgctgtcgtaacggtctcggcgtctgctaccacgggcgacgatgcgaacaccacaccagcgaagaaaacgaccataaagcgcgacggacgcaccctgatcctacgggggataaagcatccgcacgcgctgatcgggatatggaaaggaagaggaaacgtgagcaaatatcgcaccgaatttatggatgaagtggcgcggatcgtcgaagaggtaaatgcggaaaagccgctcgatcatagcgacttccaacttggcgtaaccgagggtaagcagcgaatgtcacaagctatcggaatgctactcgctggcactgacacggacccgcaaaccaatgaccaatgggaggctgaagttgacgacctgaccgcgaaactcaagaaggccaaggagtacattctgctcctacaggtattgcgcgcacggtacgccacggagaaccggaagctgcgcgatcaaatcaaccactgacccgcacagggtctttttttatgcctgaaaggaagtcatgagcaacaaagttgaggccacataccacagcccattcctatgcgatcactactgctgcgagggtgcgcacggatgctacaaggattacaaatgcgcgtgccatcgtccaccggtagacgcgatgcccgtatttattgagccgccaagtttcgagtgggcagatgacggccatgactgcgactgagtggacgaaaaccagcgccgtcgaggattggcgagcgcgcaagcaacgtgaccgtctctactacgcagatgctgaagtagcccgctgcggaacgtgcggcgagtggatgtggcggcgcaaatgcaaagtgccacacgacaacattttgaattttcgagaggaagaaaagtaatgcctaagccaagaacaacaccgagtcactgcaaggtctgcgaacgtcccatgcgtcgcactggagtatcagccaaggaagcgccggacactgtcgtttaccacgggatcacgccggacgggcgagcatcttgcgcaacctgctttcggcgcgtcatgacaggccgcgaaaaggtgttcttgaagccgctcgaagcatccaatgtcaagatccccgcgaagttgcctgatgacgttctaaggcgcaacgagggactaagggcatatgtcttggatcgtcgccgccgtgggattcctagcgttgtggggtgggcggcgtgatcaccatatgcccgtattgcaataagccgcacccaacgaccacgagcgcacgagttgccggatcctactttgtgaagccgtacaagttcgccgcgaaatacgacggcgcaccacttcgaggcacgcgccaagaggccgaactcgactactgcaaatggaggaatcgtgactcgaagtagagcatcagcaagagccgctggaacgagctttgaaacgctcattgtgaagcatctcgcggcagtcatagacgaccggatcgaacggcgcgcaaagagtggcgctaacgatcgtggtgatatttcaggctggcgatatgcgggtaagcgcatcgtcgtcgagtgcaaaaacacaaaccgcttggagcttggaatctgggtctctgaggccgaggtagagcgcctaaacgacgacgctcaagtgggcatggtgatccacaagcggcgcggaaaaggtgccgccgaagatcagtacgtgaccatgacgctgggtgatctagtgaggctgctgacgtgacccaaagaatgaaaaacgaaattctaatgaacaatcacccacagcgcaacaaaatcgcacataggttcgatatactagtagtggtaaataaaacggccccggcagtgctaccaacactgaaacccggggcctaccactgacaaggagtggcactaatgagtgtacccacagacggcttggaaggccgcaaagaaatcgcgaggacgtttctcgcgctcgccaatgacgagtatcagaagcacaacatccaccgtggatactatgcacggatcgccaaggaacacggcctaacaaatcaagaaatcgcggaggcttacgggataaccgaagctgccgtgcgtggcttgattcgccgggcggtgaagtagtgcctcgcatccgcaccatcaaacctgagttttggtcagacggaaacatcgtcagactgtcgcgagatgcccggctgctctatatcggaatgtggaacttcacgctctgcgatgccggtcatgtggacgatgacatcgtgagattgaagatcaacatcttcccgatggacaacattgacgtcggcgtaccactccaggaacttattgaactggatcgaatatcgcgcattgacattggcgatgggaagaaatacctccacgtcaaacggttgggcgaccatcaaaaaacagacaagcggtggactccacgctgccctgtttgcgctcaccaaaactccccgaaactccccgaaactcccgcgagttcaggcgagactcaacgagtctccccgaaactccccga

SEQ ID NO: 529 - DNA, 2719 bp, Zea mays
  source 1..2719: mol_type = unassigned DNA
tgtatgtgtggactatgggtcctatctcggattcgactaactcgctcacggtaagcggcgatttctcattctccggtagcgtctcagtttccacgtcgtcgggttcacagtggtctacgtctaatcagcagctcatcaagacgatcaaccgtactttctcgccactgtatggcggcgcggttacgtctagcttctccggctcactgagtggcattgaggctgtcggcgggtccgtcacggctacggcttcaggttctacgacgacagccaagcggccaccctacgcaccggatgcgccaaccgctgtaactgtagctcgcacggattcgacgcggcacacggtctcgtggacgcgcacgaatgccacggatccaacgaagatctatgacacgcaaacgatccagcgcgcagacgttctaggctccggctcatacgtcacgatctccacgctcgcgggttcatcgtcgtcattcgtggacacttctacggtctcgaataagaaataccgttaccgtgtccgcgccaacaatgacagcggttcttcggcgtgggcttactcgcccaccttttacaccgcgccaatctcgccaaccgatgtcaaggccgcgaagtctggcggcgatattgccgtttcgtggactcgacgcgcacatgtcgaagcgcgctacgaggtcgaggactgggcgaacggtgttgcgacaacgccaacgattctcacggcggcaaacgcggcatctactgtcgcaacggctcccgatccagctaagacgcacgcttaccaggtgcgcgctttcgttgacgatgcaacctttgggcgactctattccgtctattcggtgcaatcggccacggtgcaacttatggcaccgccgaacgcgccaacgaatctcgcaccaagtggcaacgctgcggatggcgcaaaggcgatcacgctctcatggcgtcacaatcccgtggacaccaccgcgcaaacgtactactcgctacgtcaccgcgccgtgggtgcttcgacgtggactacggtcgccaagacggcaagccctacacagtcccgcgcgctcgcggctggaacctacgcgaacggcactagctttgagtggcaggttcaaacgtggggcgatcatgctaccggctccgagtggagcgcggttgctgttgtgccactgtccgcaactcctatcgcgacgatccttagccctgaaacggttctaggatccaagctgaccgctcaatgggcttatgcggatccagagtcaacgaatcagtcagcttatcgcgtcacgctcattcagtctaggcagactctcgaaacatataccggatcaggttcggcatcatcgcgagttcttgcaacgcgactcgataacggtggaacttatacgctcaaagtcgccgttcgcgacggggcgggattgtggtccgcagatacttcgcaggtgttcacggtctcctatgcgccgccaccatctgccacggctacggctatctatgacacttccacaggcgcggcggttatcgaggtcaccattcccggccccgggtctggcgaagtggacgcggttacatggcacctagagcggcacactggcgcgggtgattgggttgcggtcactaactcaatctcggttactccaggtctttccgagtctgttgttgaccagctcccggccgtgaatgctctcaatcggtaccgcgtgatcacgacctcagagcttccatccacggccacatcggcagaagttatcctcgacacgtccaagcatcggggtttcgtctacgtcaacgccggccccggattctcgcaagtgatcaagtttgcagatttcgccacggcttcggtcaacgcgacacgcgagcgggtattcaacaactttgcagggcgctcgtatccagtagctactaccggcgagacgcgtgacaagacagttagcgtttcagggcgactaggggataactcttctacgccgtccgaggttgaagcgcttatggatctcgcgggaaccttctgtgtgcgcgctccttacatgaagcaaggcgcgggcgggaatgttcgcgagtttgtgcagcccaactctgggactgcactggaatttgagcgcatcaagggcactgtctcactgagcttccgaaaggtggatttcattgagtagcgtcgtattttcggatcttattgaccgtcggacttatgacgcgcttactgaccgccacgaagaattctggacgtatcagcgactcgatcgaaacctaaacctcatcgaggaagtggatggggttgacgcgtgttcggtcgatctgaacttcaattcggatgtgcgcggctccggctcattctcctaccttggctcaattgactggcgtaagggcaacttgattcgcccggtatacacagtcaaggctggggattctgtcgcgtcatggccgctgggtgtctacgtcccaatgtcgccgcaacgcaagcatggcgctacgggttcgccgtgggaatttcagatgtacgaccgcatgatgctgttgcgggacatcaagatgagtaacacctatacggcggcaaagggcatcaacgccattggtcgagtgaagtacctgctcacattctggggcttaccccaatacgtgattgacgactccgatgaagttttgcgcacggcgattacatgggaaccaggaacaacggttctgcgtatcgtgaatgctgtctcttatacacatctgacgctgc

SEQ ID NO: 530 - DNA, 2584 bp, Zea mays
  source 1..2584: mol_type = unassigned DNA
taaagcagaaagggcaaccataacataggagatgtggagtttagtggtgaattccaagcttcggatcccactgtggtggatgcattttaacccatcacatatacctgccgttcactattatttagtgaaatgagatattatgatattttctgaattgtgattaaaaaggcaactttatgcccatgcaacagaaactataaaaaatacagagaatgaaaagaaacagatagattttttagttctttaggcccgtagtctgcaaatccttttatgattttctatcaaacaaaagaggaaaatagaccagttgcaatccaaacgagagtctaatagaatgaggtcgaaaagtaaatcgcgcgggtttgttactgataaagcaggcaagacctaaaatgtgtaaagggcaaagtgtatactttggcgtcaccccttacatattttaggtctttttttattgtgcgtaactaacttgccatcttcaaacaggagggctggaagaagcagaccgctaacacagtacataaaaaaggagacatgaacgatgaacatcaaaaagtttgcaaaacaagcaacagtattaacctttactaccgcactgctggcaggaggcgcaactcaagcgtttgcgaaagaaacgaaccaaaagccatataaggaaacatacggcatttcccatattacacgccatgatatgctgcaaatccctgaacagcaaaaaaatgaaaaatatcaagttcctgagttcgattcgtccacaattaaaaatatctcttctgcaaaaggcctggacgtttgggacagctggccattacaaaacgctgacggcactgtcgcaaactatcacggctaccacatcgtctttgcattagccggagatcctaaaaatgcggatgacacatcgatttacatgttctatcaaaaagtcggcgaaacttctattgacagctggaaaaacgctggccgcgtctttaaagacagcgacaaattcgatgcaaatgattctatcctaaaagaccaaacacaagaatggtcaggttcagccacatttacatctgacggaaaaatccgtttattctacactgatttctccggtaaacattacggcaaacaaacactgacaactgcacaagttaacgtatcagcatcagacagctctttgaacatcaacggtgtagaggattataaatcaatctttgacggtgacggaaaaacgtatcaaaatgtacagcagttcatcgatgaaggcaactacagctcaggcgacaaccatacgctgagagatcctcactacgtagaagataaaggccacaaatacttagtatttgaagcaaacactggaactgaagatggctaccaaggcgaagaatctttatttaacaaagcatactatggcaaaagcacatcattcttccgtcaagaaagtcaaaaacttctgcaaagcgataaaaaacgcacggctgagttagcaaacggcgctctcggtatgattgagctaaacgatgattacacactgaaaaaagtgatgaaaccgctgattgcatctaacacagtaacagatgaaattgaacgcgcgaacgtctttaaaatgaacggcaaatggtacctgttcactgactcccgcggatcaaaaatgacgattgacggcattacgtctaacgatatttacatgcttggttatgtttctaattctttaactggcccatacaagccgctgaacaaaactggccttgtgttaaaaatggatcttgatcctaacgatgtaacctttacttactcacacttcgctgtacctcaagcgaaaggaaacaatgtcgtgattacaagctatatgacaaacagaggattctacgcagacaaacaatcaacgtttgcgccaagtttcctgctgaacatcaaaggcaagaaaacatctgttgtcaaagacagcatccttgaacaaggacaattaacagttaacaaataaaaacgcaaaagaaaatgccgatatcctattggcattttcttttatttcttatcaacataaaggtgaatccgacgtctgtgctggtagaaaagatcaaaggatcttcttgagatcctttttttctgcgcgtaatctgctgcttgcaaacaaaaaaaccaccgctaccagcggtggtttgtttgccggatcaagagctaccaactctttttccgaaggtaactggcttcagcagagcgcagataccaaatactgttcttctagtgtagccgtagttaggccaccacttcaagaactctgtagcaccgcctacatacctcgctctgctaatcctgttaccagtggctgctgccagtggcgataagtcgtgtcttaccgggttggactcaagacgatagttactggataaggcgcagcggtcgggctgaacggggggttcgtgcacacagcccagcttggagcgaacgacctacaccgaactgagatacctacagcgtgagctatgagaaagcgccacgcttcccgaagggagaaaggcggacaggtatccggtaagcggcagggtcggaacaggagagcgcacgagggagcttccagggggaaacgcctggtatctttatagtc

SEQ ID NO: 531 - DNA, 2322 bp, Zea mays
  source 1..2322: mol_type = unassigned DNA
taaataaaatgattattgttggctcctatttcacgtctgtgacccaatagaagctcgatgtgaaagtgagtgttggaatataatataattgaattgtccacattttcctatcaacttaaccttttgagttgaattggttagtgcatgcaacttaataaacaaaaaaatgatataccacactgtttcgttattaacaaaagttttaattagttacaacgggatgtgctcccgtcagttccgtggtccacgtctagaaaacttcaccaagtacttcaatgccattgctaccagctcgggaacttgtgtgtgtgctcttctgctctctcgagtgtgactgttttgtccctataccgtcccaactttaacatttgcgtcttatcccgttacaataccaacgaacttcgtacttgctgctgcatacacattagggcgtgtttgatccaaaaataccatggtacaaaaccatgatattcgaaacaaagttttatactatgtaaccaaacacatttttggcaaaaatacaatggcattctcagtaccatgattttaatttaaaaattcaaaaatactttgttttccaaacatccccttagggcttgtcaccaaatcaagccttaatggcaaactggaccactggggtgctgtcaaagcaaacatgtacgtacgtgtaggtgtatgtcctttttttttgttattcattcacacaaagagcatgtttgattgtacgcctaagatgtcacatctaaggttagcaccttgccacatggtctaaggttagtcccattttttatctccacacttaaggttaggcatgcctataaatatgtggtagttgtttggattgctaccacaaggttaggcacacctatgaacatatagtagttgttaagtttatcgactaacataattgatgccacacttttcaatgataattttgcaaactttgttctaagatttagtcgtgtttttttattttcctattagtaagccatgtgatttgaaaatatatgaatgtgatattttttatttaactgtctcataagaaataattatttagaacaaaaccgatattatgagttggtaaccaactcatataacaatacatatctcataattctataattccatgatttgcaacgagatgtttgatcaaggtgatcaatcaatcacattaaaatggacaactgcagtcaaacaactaaattcaaccaataactatattgtcaacatgaacccttaacaaaacaaacatgttgtaggtaccagaaagaaataatagaactagtagcaacagagacaacatcacataacataatgaatatgagggtaccaaaataacatatttatatataaagcgcataacatgttcaatcatccataacaaccccatcataactccacaattcttataaacacctttaaaaattcacattatccaaaaaagtatctaaatataaataaaaagagtgatgtaatagctaacagaatcatcatccatctccataaactgtcatgcatcaatatataaaaatgcaaaataaccaacatcacatcattcatctcctgcttgtatcaacctattacaattgtaggatatcttaaaatattgtgaacataaacaacataattctattgacattaagtataacaaaaatatatagtcaattcacaggtccaaatcaatcaaatgcttcaatacacaagactcaaatgttatgtcagatgcaacagataaaaaatctcgcatacccttttaatatttttatggtagatatgtttatactatcaaattttgataagtaataattgtaatattctcaagcctttgccacaccatagcatcggagttaacaaaaggtataaacattgtaggtggtagattctgaatatcattccaaagttctaccaaagtagcactaagttcatctactatatttattgtacgactctttggtttcacttttctcttgactggtacaccatctcctcgtctacgctttaatacagaactcgatgaactgtgatcaacaccttgaggtgggtgatgatttggggatggtaacgtgtcagattcattacctaaatcattcacaggctatgaatacttaagaaatcattgcaaaaattatcattgatgtaactctcatcttcaatctgagtttcattcatgcagagtgtaccattcatggctagagagccatcagcaccgtcgtcaatgaacaactcctacataacatttaaaaactagatagacttataaaattgttccacaattgttaattcagtggtctgattggcctactgtaaagcccaaaatctatg

SEQ ID NO: 532 - DNA, 663 bp, Zea mays
  source 1..663: mol_type = unassigned DNA
ataagaacagtagatagcgatgcgaggaatacaatgagtggaatttgagaaagataggtatccaagattgtcttgatttcttgttgctccagcactactttgagcaagagcagcttctctaggttttctaaaatgtaacagtagagatagcagtgagatgaaccatataaaaaacaatgacaaagaaaacaacataaacccaataattcaagaggaagtctgagatgaagaagtggcgacgaatctccaattcaagaggacaatgatagcacaatgttgtttgtcatgaagtatagtgttctgttcagcctccattttagcaataattccttaacctactcattatattattgaattgtatcaaccttttttccaataagactaaagactcgagtcctatgagtaagcttaatgccctcaggattacattcaattcgagttgcatatttaatttcaggacaaacaattttgtgcttatgacctttgacttcttggtatattttattagtgtgcaatgtgatcaggatagaaaaaagtttctatttctttttgtgtaggtagtatttttttagacatgtattataagcatataggaaaacataacaaaaaggtaaagaaagcaatccctcactatatatatcaagagtagaaatatctttgtgt

SEQ ID NO: 533 - DNA, 672 bp, Zea mays
  source 1..672: mol_type = unassigned DNA
atctaaggaaactatacgagaagcaaatcagacaatctatggtttatgttattatctttttcattgtttctcatttttgtttttatatgatttttcttgctgatatctctgttgttacaactttataaaatatggagaaggtaccctttctgaaagtagtggtggagcaacgagaaatcaagatggtttgagtcaaacactcaaacattccccaaattgcactcattatattactcgcatgcctaactacacttcttatgtttctctcaaaacaatagtgaatcccttcgcagagccaagcagctataaggacataagtgaaatatttctatttcatcatttttaatgttttctatttttgacagttgtaagcacattgtttaaatctttgacagacattcacaatcattatactaagattgtgaatatgattgtcaaatatctgtctggaagtgcaacattcttccccagatttgttgcgttcaagtaattctgttgtctcactttatcgttacctactgtcaaaatattattcttaacatttttgcatttgataacaacttcacaccctaactattaaattgttgtcattgatagattctttgttggctttgagctctcttgattgttttatctcatcattttctatcttaaaaaaagggtctatgcaag

SEQ ID NO: 534 - DNA, 9365 bp, Zea mays
  source 1..9365: mol_type = unassigned DNA
gcgacaccagtaccaagccaaccccactcgatcccaactccatttctcattactcccgaaatgaagatctgggcggctaagacaacaccagccgtcaacgtccacaccgcatcaacagagttcgctctctactggcgcgagaacggcaacaagaaaatcaactgggaagccacatggaagaacgacatgctcaaaaagcaacagtggcgcgaaaaggatggatggaagccaacccccggaactgaagctggggaactcgatgtggacagcattcttggcgtggactactggacgaaaccgaatccacccgaaggtctcccactccatgaagaagtcgcatggatgaaagagtctcgacgcaaacacaatgaagagcgctaccaactcgcactagcaaagatcggaggccagaatgcaacagaggtttgatcttgacgcagaacgggcgctgatcggctcggtgctactcgatgaacgtgtgctcgatgaactcaccgtgaatccggatgacttctttcagccagcccacgaacaactctggaagctattcacccaagagcggcgcaataacaagccggtcaacccgatcacgattagcaaccagcttgtcggtgacggcatcggtggcatcaagtccgactaccttcaccaatgccttggaatgatcacctcggttgcagcggctccacactatgcagaaatcgtcaaaggactagcgagcctacgacgcatcggagacgttgctggagtactcaccaatgcatctgagacggcgcaatgggaatccgccgaacaagtcctagataacgctcgctccgaactcgaccgagctgcatcaaagactggcggagttcgcgtgcgcacattctcggacgcgctgaagtcatcgctagacgtgtggacaaatccacggccacaaggaatcaacaccggctggcctgaacttgatcacacgctcaacggtggatggaaacctggacagctaaccgtggtgggcgctcgaccggctgtgggcaagtcactcgttgccggttgcgcggccgtagctgccgccgagcacggtgtgggcttcttcagtctggagatgcgcgaagaagaggttgtggcgcgaatggctgcggcatctcagggagtgatgttggagcacttcacaacctcacgactcacgagtgaggatctgcaacggctcgaagctctaagtgagaagtcatcgcgctggcccatgtacatcgaagacaactcgaccatgagcatgtccaagattcgcgccgccgtaaggacgtggaagcggcagggcgatttgaagttagtcatcatcgactatctccaacttgtcgaacccgccgaccgatcagaggcacgcgagcggcaagtgtcgcgcattgctggagactgcaaggcgctcgctaaggacttcaatatccatgtgttggcacttgctcaagtcaacaggaattcggcgagcaggacggacgcgaggccggttgtgtcagaccttagagagtctggcggcatcgaggcattcgcggacaacatcatcttgcttcaccgaacgtcagacaaggaatcggaaatcgagttcatcgtgggcaagaaccgccacggccaagaggcgaatctgcgaatggtgttccgtccgcacttcgcatccgtcaacagtatggcccgcgagggtcaagcagccagatttggaatgtagggaatatgccactcattgctgaaatccaagacataaccgcttactacgacgcatcgagagtccgccaagacgttgactacgtgcaattcttcggtgagcttgacctgaagcttgaccctccgaagcgctggccggttcggaatcgtgagctacgagagccgattgactcggtgaagcgcgcaatcatccaccagcgcgacggtgagttttgccgagactgtgggagtcatgcgcggttcgctgttgatcacatcatcccgcgctcagcattcctcgctgaagatgttccggtcatctccgataggtcagacaacctggtgagcatgtgctgggactgcaatcaatccaagagcaacttcgagcatcggcagatcaagaagatgggcgttactagacgctgctgggactgcatgaatccgtggtactcgcatgatgactatcacggcgacgatgaccctagacctgattgctcattgatcgcatattgcggaagttgtggaatcaccacggttccgaatatcaactggattctttagataaaccaaaagcgccgtccaactagggcggcctttttcatgagagggacaccatgagcctaaaagcagcactcgcaaagcaagccgagccaatccgcacactatgcgcgctggaaaagatttacgccacgctcgatgatgacgataagcaagcgctacgtgaggcggtcgagaatctagctattggccctaccgtcatagccgaagcgctcaagtccgttgggcatcatgccagcatctcaatggtcaagaccatgcgcgaaaagctcaaggcgggtcacacttgggagcgctagaggatcggctgaggaagaaagctgcgaacgaggttgtgtccacatctggcacgggaccactgaccgattcgtacaccatcagtagcgaggttgcgtggggctatgaggacttctgcaacttcatccgcgctaaaggccaggatccagaaaaggtctcgttcgactggggtgtgacgacaaaccccagcggcggcgtatggaacaagctgaatcgcgtaaggccgaaagttgagacgtgggcggatcttgtatcggtggaggaaatcgaagccgcgcaggatcggctcaggtcttactcactgccgcgcaaactgagtcaaaatgattccgacgctccgtgcgcagccgttctcaatctcgcggacatgcaattgttcaaggctgacggcgacgggctggaaggaacattggatcgtgttgagcgtggcattgagaacttccagcgctacatcgacaagcagatagcttcgggcctgaacctgaatgaggttgtcattgtcaacaacggcgacccatacgagggcatcgccgggaactatgcgaatcagctgcacaccgtcaagggtggcttgagggatcaaatgaacatggtcattgacgtgtggacgctcatagctcgcgagttcttcccgcagttcgagtatgggcaattcatcaccatgcactgcaaccacacccagttcgggcggcagggcggcgcaaaggaatccattacgggtgacggcgacacgggatcggcgctactcgcggaaatgcttgagcgcattcttcatgggcgcaaagagtttgagcatgtgaacttcaccatccccggcgaggagatgaacgtctacgcggacattgctggcgtaaagacgggcttcaatcacagccacaagatcccaggttccggcgcagacggcttcgagaaatggctcaacggtcaagttcgatatgacccgcgagcctatgaggtcgaggtctgggtcacggcgcatcggcacagcttgatgttctttgatcttggctcatgctcggtttttcagtgcccatcgtgtgacggcggctcgaagtggcttagcgacaagacgggcaaacattcacggtcgggcattctcgccatgaccatcggcaagcacgctccacttggctggtctgaccatgcgttcctatgagcgcgccgtcattggcgcaaaaacggctcactgagccacgaaaaccactccggcggggaaatactcgccgggggaaagatcgagccttaggcgaccgcctgaggctttcgtcatgaaagggaaagaaatgtttacggaagaagaacttgaagcggcgtgggactccactatgggcgacgagtgggcggaatgggaaagggtggttgttgatgcgcgtgcgcgttacacgagcttcgccaacgccctccacgccaagcgcgagggtgagccgattgacgcgaagaatgtgcgcgaaggtgaccgggtgcgggggaagctcgcacggctatgtagcgattatgcgaggggcgggatcgtcgagggtgtggcgtatcagccgggagtcgccggactttgtgttgccggatgggacattaatgcgctcgacgatcttcgcctcctccaccgtccagcgccgaagctccccaccgaacggccagcggttatcctcgcgaccgaggtgggcgggaagaggggcaggtgggaaatgatgctggactatcgcggccactggatctctagcgacgtgatcaacggctgcgtgcgccactacccccacgaaatcaccgcatggaagcccgccgatttcgtggtgcgcgaggaggaatcatgagcgaggagacctgcaacttggacattgttcctagcattcctgagcgccatgacgctcccagcttcttcaagcgcctcgataatgcggttcgcgagatcgaagcgatgaagctcaaaagcgaggccgaaatgatgaagcttcgaaatctggaggagtcatgagcgagccaacctacgaagaactactcacccgcaacaaccaactcgcccgcctgatcgtgaacatgaccgaccggcttgaaggctcgaagaaagagcttatggcgacggcttgggtcaatggcgtgcgggcactgcaagacatgactcaggaatcagaaacgaccgtggccctctgcctggcaacgaatccatatgccgaaccagtcgaggagatggggcaatgaacgcacgagccgagcttgactcactgaatgcgagattgaaccgcgaggcagaaacgcgtttcggcaaagcaatcctcgacgtgaagtacccacacgatgcaccgcactctgaagatgacgtcaggcatcacaggatgaaagagacaatgcaggccatctcgcagaccatcgtgagtattggggaggcaagaaagagcatcgggtcaatccttggacttgcctcaagcacttggggacacaccgggcacactaaacagcgcaaggagcgtggactgtgaacaagcactatgacaatgcaatggagatcattgaaacagccggggaaaatttcatccaagacgaggggtggactgagacaacggcaatgatggcaaccatcgacgccaatacgcacgccaccctcgcactcgcctacgagcaacgcacagcgaacctgctgcacgcgctggaaatctcagcacgagcacaggggacgttcgaccgcgaagagctagagcttcaagtcaaggaaaggttggggttgtgatgagcgagccaaataagtgggaaattgtgtcaacgccaccacctcgtcacgagtgcaaacttccacctgctgagaatttccaagtgggcacagtgatcaaatgcacggtttgcaacaagaagcatgtgtgccgtcggttgctcggagggcgagaagaaggcgtgcattggctgggtgtatcggaatgacaactttcactgagtcaactcaaggtgcttgcccggcaaacttctgcggttgcttcaagcgcgacggccgcagacgtttgccatgcgggccattcctggaaatttacttcagcggagaccatcgcatgaacagcgtgcatattgaagcgtcatacctgcgcaggatggcgccacgcaagctcgcgaatggctcgtggagtgacggcgtaggccgtactaggcctttgcgggacttcgacttctatatacggaatccgagccgaatctacgtggtcaagcttcaggagcagtggcacccgtgcaaaggagcggagctgctcaccaacgacggcttccgaacccacgccgaagcaatcgcctacgcagacaaggtggcgcgctttgagcactgaacgtatccagcttgacccgagcatgggcggcagaagcgtggcctacgtgaacatccccgaagctgagcactacgagtacatcactattgatcgcgactggtgcgaggttgagtggacgcatgtcggcaggggcaccgcgaaagaagctctctcgcaactcgctgaacgccgcaagaagcatcgtccgatcattgatgggatgacactcacctacgagcacgacggcatcaagtaccggatcacctatgaggacgtgacggaatgagcgcatctagagacattcccacatctaatgtccgcagcctacgacataaggcagccatcaaggcgaaccgggataagtacatcaccgaggttcgcgacattcgacggatccagtgggaagttttagggaggaagttgtgaccgagcaaattgtcatcattgcggtgggtgcgctaatgatcattggttttaccattctgctcgccggtattatcccgccaagcggaaagccaacacccaaaaagcggcactacgagatagtcgagtttccgccgaaggagcataaatgcaagcttccttgggcatggcgcttcaaggttggcacggtaatcaaatgcacaacatgcggctatgagcggaaggccgcgcgactaccacgaaggccccatgtcaaaatctgggatgggcacgatgaaggcaactacgaagagattgatggggtggaatcatgaccgagcaagtgccagaagcgcaagagattgaaagcattcgcgtatatgggtgtgacgtcgagttgcatcacggagcggacagcggcaccgtgtcggacgtgatcatcatcagccgccgaatcagcttcggagacgacgggcgaccatatgacgaaatcatgctggacatgtcgaacatggcgactggcatcatccagcgcggaatgatcgacgcggcaaaggcgtctattgatgacgcatggagctggggagattgggacgatgacgacgatgacgactaaaccccgcatctattggtgcgcatcagaatccatgtggcgcgtcgagattcgcatgagtcgatacatgttgcaccggcgaccattccacgactggcacgatgcgctgcaattcgcactagatccgaaagggtctttttttatgcccaattacggaggtaggccatgaccgagtttctagctgctgtggggattatgttactgatcatcctccccgcgtggacgttcgcgctgtggagagaacggcaagacctggatcaagaatggcgcgcactcaccgacgaaatggtggagcacgacggacgagtacgacgcgaaacggccgagctaaatgcgcggaagttggctttgtcgaggatgggggaagcggagtgagtgtcattcaatggattctcttggcagtgttgctttcctcgatacttgtgacgccggtggcattgttctggcctacagcgaccccgcgcagatggccatcaggggacaatgttagcgggaatacctgcgagctacccgactactacaggcttaaggcattcgacctcattgagtgcccaaagtgttcttcgcggtggacattttgggtgagcaatacatggcttggtgacgtctgccactggatgctaattagtcccaccagagatctatgcgggggtgatgccaagtgaccaagcgcgtaaccctaggctcactaatcgagatgctgacacgcgagcacatgcgctggcgtgaggacggacttgttcaagtgccggcgctgttggatgaacttgatgcggcggtgacggattcgggagtagcggcggcaagtggtggcggaagttcatcaccagccattccgataaacctaggtccattcgacttgcgcatggatatccacgcaaccgcataccagcaatgggaagaagtcgcgggatattcacacaatggttccgccgtgcaaaccattgctgatctggagaagctggagctatccgaagaatgggtgtcgcacttggagcgcgtgttactcgaatggtgtgaccgcatcgagtctgaacttggacgcactgcacctgtgagaaagttggtaggcgttccatgtccagcgtgtcagcttagcgtctatggcgaggatcgtaagcctacggtttacgttagttgctacagtctcgacggcggaatgctgccaccatctgactggctcgcggggtgcaagtcttgcggcgccgaatggatcggtgaatcattgaaaataattatccctttcttgcgcataaatgatgcaaaagaatccgatgacgtggtagcatagtcatcaggacaccttaggtgtcgaaacattcagatcgcttcggcggtctttttttatgcccgcggtgagtttcccttcctttcgcaccgcgggcattccctaagctaccgagagtccgcacccacacaagagcgttgcgcacgactccgaccgaccgcgtaccgggcgaatagtacgcgtcaaactttaggcggcgcgatgagtgtcatcagcgagcagggctgtgatagatgcggtgtccacgttagggcatacgcacgactagacacccgtgacggcgcactctacttctgccaccaccactacagcctgtactcaatcatggcgtgctcagcgtttggtgagtgggcttggacggtgacagtgaacgtgggggagttaggtaaccacgcttagttcacgttgacgttgcttgcacgcctgcacgaacttcattgccttagctgcatccttgcggtccacctcaagaagccatgagaaatccggcgaggttaccgacaaccaggattcgccgccgctcttctttttgagtgccaatgcgaacacgccggtaagtagcacgcgagatgccgttacgcgcttcgagagtgccgcgccgtcctctagctcgatctcagcgccgataagggattgacgacgctcaccctttggcttgctgagatcttcaatgtcgccgttcttgtacaacaagagcgtgccgaagttatccgttggtctgtccgagaaaatgcccatgcggtaagtcttggctatctggtggatgaatgcaaggggtgttacgtgtcgaggactggaaccgctaagtggaagcgcgtgcgcaacgaagcgctaaaggaagcgctcgaagttggattattcaactgtccactctgtcgcgtcccacttgactgggaatactcgcaacgcccaaacagccccgaggttgaccacattattccgcacgcaaaaggcggtcgggattcgctcgataacgtccgcgtgatctgtcgcctgtgcaatcagaggcttggatcgtcaacgcgccgcgacacgccgacaatcgaggcgatcgaggttgagtcgtccgggatttggtgagaaggggtggcgggttaccctcacccaccggcgtgggctagcagtgacttgaagtcgcggccgcactgaccctatagtgagtcgtattaatttaaatcataccaacatggtcaaataaaacgaaaggctcagtcgaaagactgggcctttcgttttaagctgattggcacgtaag

SEQ ID NO: 535 - DNA, 2440 bp, Zea mays
  source 1..2440: mol_type = unassigned DNA
cttcgggaagcgtggcgctttctcatagctcacgctgtaggtatctcagttcggtgtaggtcgttcgctccaagctgggctgtgtgcacgaaccccccgttcagcccgaccgctgcgccttatccagtaactatcgtcttgagtccaacccggtaagacacgacttatcgccactggcagcagccactggtaacaggattagcagagcgaggtatgtaggcggtgctacagagttcttgaagtggtggcctaactacggctacactagaagaacagtatttggtatctgcgctctgctgaagccagttaccttcggaaaaagagttggtagctcttgatccggcaaacaaaccaccgctggtagcggtggtttttttgtttgcaagcagcagattacgcgcagaaaaaaaggatctcaagaagatcctttgatcttttctaccagcacagacgtcggattcacctttatgttgataagaaataaaagaaaatgccaataggatatcggcattttcttttgcgtttttatttgttaactgttaattgtccttgttcaaggatgctgtctttgacaacagatgttttcttgcctttgatgttcagcaggaaacttggcgcaaacgttgattgtttgtctgcgtagaatcctctgtttgtcatatagcttgtaatcacgacattgtttcctttcgcttgaggtacagcgaagtgtgagtaagtaaaggttacatcgttaggatcaagatccatttttaacacaaggccagttttgttcagcggcttgtatgggccagttaaagaattagaaacataaccaagcatgtaaatatcgttagacgtaatgccgtcaatcgtcatttttgatccgcgggagtcagtgaacaggtaccatttgccgttcattttaaagacgttcgcgcgttcaatttcatctgttactgtgttagatgcaatcagcggtttcatcacttttttcagtgtgtaatcatcgtttagctcaatcataccgagagcgccgtttgctaactcagccgtgcgttttttatcgctttgcagaagtttttgactttcttgacggaagaatgatgtgcttttgccatagtatgctttgttaaataaagattcttcgccttggtagccatcttcagttccagtgtttgcttcaaatactaagtatttgtggcctttatcttctacgtagtgaggatctctcagcgtatggttgtcgcctgagctgtagttgccttcatcgatgaactgctgtacattttgatacgtttttccgtcaccgtcaaagattgatttataatcctctacaccgttgatgttcaaagagctgtctgatgctgatacgttaacttgtgcagttgtcagtgtttgtttgccgtaatgtttaccggagaaatcagtgtagaataaacggatttttccgtcagatgtaaatgtggctgaacctgaccattcttgtgtttggtcttttaggatagaatcatttgcatcgaatttgtcgctgtctttaaagacgcggccagcgtttttccagctgtcaatagaagtttcgccgactttttgatagaacatgtaaatcgatgtgtcatccgcatttttaggatctccggctaatgcaaagacgatgtggtagccgtgatagtttgcgacagtgccgtcagcgttttgtaatggccagctgtcccaaacgtccaggccttttgcagaagagatatttttaattgtggacgaatcgaactcaggaacttgatatttttcatttttttgctgttcagggatttgcagcatatcatggcgtgtaatatgggaaatgccgtatgtttccttatatggcttttggttcgtttctttcgcaaacgcttgagttgcgcctcctgccagcagtgcggtagtaaaggttaatactgttgcttgttttgcaaactttttgatgttcatcgttcatgtctccttttttatgtactgtgttagcggtctgcttcttccagccctcctgtttgaagatggcaagttagttacgcacaataaaaaaagacctaaaatatgtaaggggtgacgccaaagtatacactttgccctttacacattttaggtcttgcctgctttatcagtaacaaacccgcgcgatttacttttcgacctcattctattagactctcgtttggattgcaactggtctattttcctcttttgtttgatagaaaatcataaaaggatttgcagactacgggcctaaagaactaaaaaatctatctgtttcttttcattctctgtattttttatagtttctgttgcatgggcataaagttgcctttttaatcacaattcagaaaatatcataatatctcatttcactaaataatagtgaacggcaggtatatgtgatgggttaaaatgcatccaccacagtgggatccgaagcttggaattc

SEQ ID NO: 536 - DNA, 2082 bp, Zea mays
  source 1..2082: mol_type = unassigned DNA
attgtctcgtgggctcggagatgtgtataagagacagggttatgaaggtgagtaagtaatgtacgacgctctcatttggcctgacatccgcaaggctctcgtgctcatggtggacggcgaggaacacgctggttcagtcatctacgcagctcagcatatggaagttgacgctaacggaatctcacatattccgctcgcgttattcctcgattcggctggtggaaacatcggctatatcgaccgtgccgaccgtgtgctgattgaggtttacgcgccgggcgagcttgcaaagaagatcctcgaaagcatcatcacctcattgtgtggtgacggcatcgaggggcctgacgtgttcttcgattccattcagtgcatcgtcccgcctactgaatcgccttacccgcaagacactctaaatctagcaacggcggtcattgagactatcgttcgcccgctcgactagtcgcccacctttcaccccactcggggtttctccacattgacaccctcgaaaggggttatttgctatgtccacagtagaaactgagcgcaaggacttcgactcccgcgcactcgttcggaaaactacggtaggtctcgcgtgctttgcacctaagactgtcgagcttccggctaccctccttacttctgcaaccgaaatcgcagacctgtccacgctgggcttcattcccattggcatggttacccgcgacggttacacgttctccggcgagatcgaaaaggaagacattgacgcacttggctattacagcccggtccgctcggatgttacccgcgtaccgcgcaccgtttccatgacgcttcttgaatccggcaaaaaggccattcaggaactcgtgcgcggtacgaagatcaccgaaacgcagtctgctacgactggtgaagttgtcttcgatgagccagacctcccgaacttcgatgaagtccgcctgatcgtagtatccgctgacggcccactgtccaatcactggatcgaggggcgcggattcttcgccgcaaagatctcatcccttggcgaagagacgtgggcgcatgaaggtgctcaccagcgccaagtgacgttcgacatcttcaatgatgacgtcgagggcgtcccggttcgccattacttcggcggctccggcgcgattctcgctaaggacattctgggatacacccagggcgcctaacccctagttgtggcgcgcacgtccttgggcggctcgtgcgcgccgcttttcattgccgccccacgaaaggtagtcatgcctactttttccaatggtgcccaaaaggtcaccgtaagcaagccaacccgcgcagaaattcagcgactcaaggcacttggattctttgaagagaagcccgcgccaatcgttgaagccaagccagtaaacccatctaagtaaaggagccagtcatggcagccgcccgcaagatttcagataagccagcaccacgtcacaccatcggatccattatcaaagacggcgaggacgttgagccatatgtgctcgtgctcgccgatgggtcagagatcacctttgtttctccggaagaactcgaagctgagtcaggtgttcgactgctccgagctgcgacgattcgcccgcatgagttgtgggagattcttggtgaatggcttcccgaagaagagcttcgattgattcgcaagcagaaattcacgcttggtcagattggcaagattctcgccgctgtcaagactcactttgaggacttcttcggcccctcgggaaactagaacgcctcgatgcgctcttagaacggtttaggccagagatccgcgccgatctcgcacatgagtacggcgtggatctctcattgttctatcagcgccgcaggtacgtggcattgctggatctcattgatcagctcccgcgcacctcgcgttacttcgaggcgatgtccaaggatcctgagtttattcaggcgcgtctagagattgaagaatctcgcaccgacgacgaagaggataacactccagagtggcatccaagcatcacagagtttggactcactgagcagctacttcgcgagcttctgcactcaatccaagagggc

SEQ ID NO: 537 - DNA, 2267 bp, Zea mays
  source 1..2267: mol_type = unassigned DNA
atggcaacatctacattggactttggaaatctggtaaaatgaatggcagaggagtgatgcaatggacaaatggcgatactcttgactgtaattggcttaatggactggctcatggaaaaggtttttgcaaatatgcatcaggagcatgttacattggtacatgggacagaggacttaaggatggacatggtatgttttatcaaccaggaagtaaaatgccttgtaaccttgaagtgtctgagtgtgtaacagaccacgatgtttcaagttcttcaagctctggtaatgaaaatatcaatagtagcttattgtttttattccaaaaactttgcaacacatggagactacacagcattttccattggcccagacgtatttcaaatggcaccacaccagtttttgatgataattctggaaacaatttgtcacaagattcatctactgtacccttgacaactgataattgtgtccaagatagtggagttgataaagtattggtctatgaaagagaatatgtacagggagtacttatctcggaaaatccaaaatgccatgattccggaatgctggatagtggtaaaacacaagagcatacatggcaaatgcaaactggagggcccatggagaccatttacaaagggcacaggagctattacctgatgcttaatttgcaacttggcataaggtaagtgcttaattgtattagtgtcttccattttttgtcatctgaattcatttttgtcaataataaattcttgtggtggttttcttcttctgggtcgttacatttatactgtgtgtacctatttaggacagttgtactttcagcacagatatgctacatctggaagaagcatatgcgtagctttcagacacagagctcacattatttatgagcaaagtattacttatgcaagaattattagcagtgggtagggaacattttgtttcagatgcataataagttctgaaaccttccaatatttgaacgacaacttaaagaatatcttttcaagaataatttggatatgctaaaactatgattttctttctttagtagtagcgatgttggatatcgtgtggcattatctacatacagtaagagttgccatggcatatttccaacacttcctgtactaattgtacgctgagcttttagggcatgtacacggttccagatctaaaaaaccatgtaggtagtaaactcaaacttaggaaaatttggtgaatccttagctcctctcaaaaagtgagcgatggttcccatactaaatcaaataacaggtttcctcacaactcccagcacgtttatcatgtgccagcatgacacagaggtggtacacctttttgctttccttattctcttggagctaaacctggattacttttgtttcaaaaacttttctttcacgaccaaaccaattcttagctcttctgcccgcaatggtatgcaccatggttttgcgagactaacaatccttagctcctctttggggcatgggttgcacatgccctatgatatatttagggaactgcataatacttatactaaattcaaacatggtatgcctcggtaaattaatctagtgaatgtccacacatcggtacctagttccctgttgctattgaggtatgcacagtcctttctaaccaccctttaatattgctatccaggtacacagtaggtaaaatcacccctgtgcctttgcgtgaagtccgttcaaatgattttggacctcgagcacggataagaatgtacttccctactgaaggctcacagtatacccctccacactgctctgtcaatttcttttggaaggattattgtcctatggttttccggtatatctctttcctgattgctaattgtattaagaatccagtatttccatacttgttttttctcgaatgtgtattgttctgttagtgttgaatgtgattcaatattgaaactatggtccatctatttctaattaactatgttgatctattatgattcaaccatctaatttactatagaagatatcaagtgtcaactaaatgaatgtggagtggttgatttgttcaacaaaaggaatttatgattagattgtctatgtttttacttgcagaagattgtatttcagaatgaattagaaactagcaagaatcttatgatcacacctctgaatcagttgtttgatttagcatgagtctgccaaacagcatcactcaaagcctcaacttgatttttttatggaagtcatgtttctctgttttactatgtt

SEQ ID NO: 538 - DNA, 845 bp, Zea mays
  source 1..845: mol_type = unassigned DNA
ttcacaataagttaaggcccttagctaatctgattcgatccttaaactttatattgtaaaatatagaggtcattacaacacctaaatgtaaacaaatctggttactataaatggcctggcgtacatggcaaagagggcctacccaatatacaaacaacactgctaacaatatatataactaaggaaggctgaaaagaatctgtgataactgaatacttcaaacataataaattaacatgccttctaaagaaacagcaatagactagaaatcacatgtcataagcagcaattcgtaaatgcaaccaaactgcaaagatttaaaatattataccagcatgagttggccaaagaacacgatgtcaacatcagttaaggagaaattttcaaccagactatggtagcctcgtgactcatcgatcaacgatcatagtgagcatggctgacaagaaatatgggattatcaaagatcctaaacatttcagttgaaagaaatgatccaagctaaaattctcagttctaaaagatggtactagtacagtagtacaattctgcaacaaagtgcaattacccgagaggtcgtctgaatatacaactgccctagttctagagtccacagttgtacatcttctacaatttgaggggaaaaaaacttccatcatgaaacatcagtggaaatgtagcagcaagatgacaaaccacaagattataaacctgaaatggcatggcatgatgccgatgacaagtcatctcctttcaccagcaaccggcctcgattccatgtgcacaggcattggtgctgcaagcccaggcttaccataggcacctctcttgttaggcttcagttc

SEQ ID NO: 539 - DNA, 563 bp, Zea mays
  source 1..563: mol_type = unassigned DNA
tctctatctttccattgagcgtgcgaacctgatcattaccagagaaactcacctttttgctcacagacgggcgagctgccacgaatgtagcattgcagccgtcatggtactcgtgggtttccaatgcatcacccataaccatctgctgatgctctttgatcagcaccttgtccacgaactccaagatccgggttagctcccggctcaccgctcgcttgccctcccggatcatcgggtctcctccctgacccaaaacacaattcaaaacccagcacaccgatggcatacagaccgacctgaacgagtttccatggtaagggttccatcacctggatagcgtcgagccggaggaggaggcccatggccacctcggagacggcggcggggtcggcgccaccgcggcggccggagagcgacccccggatcgccgcggccttggaccggagcacggcgagctccttgagctggcgcagcgtcctggagcgccgcgccaggaagcggcggaaatgggcctggatcgtccgcgccgcgcggtcactcgccgcggagggcggccccgcgcg

SEQ ID NO: 540 - DNA, 2614 bp, Zea mays
  source 1..2614: mol_type = unassigned DNA
ctatgtgaagcgtacttggggatcgaccccctcctaaggttgtggcagtatttcttcggtgcaatcaaatgttatcgggtcgtggcaaccaactattagttagatcagccgttagctagctttgctccagtcggaagtcagagtacttcaagatccctctcccttcctccatttggtatgagggcgagtggttttgtgtgaggaatgtggctgcgagcgctccgttgttcaccagctgtgagtcagtgtcctcggatgagtggcaatgcagtggagaggccagcctcaaaatcgaggtaggaaacctgttgatggcggtcagtacgttgaagcagcggggtctctctagcgcgcggctggtgcgaaccttcatgcatcgccggtccagcctctgatggctcaccagaaactgatgcatcaatactccaaggtcaacaatcccgaccatcattcccctatactgcttgctctatctaagatcgaggccaaggttacaatcatcacggtgttgtcgttggatgaagtgacggtaaaggatgaagtgacggtaatgccacacaaatcagtaaaggatgtggtcgcgacggtgaggggagggcctccggctcctttagcccctgatcttcctgcgctggatgaagtgaccaccaacgaagaatctgggccccccgtgccaacctctctgcctgtctaaggggtgccttatagtgatgccttcctccatggtctccccgagggaggtttcagctgctggtgtgtctccccttaacggagcttcatcggaggagaagggtgctccagccccgctgctgccgccaccaaccccatgtgctgaggtggagatcgttcaacctgaggcggtgtcattattggttgtcgcttctactctagcaagagtcatggtcccttcgcaggcaagagggcgccgggtggaccatccttcttctcttcgtgacacgcagggcctagatgtggaggattggaggcgagtcgaatcggcttcgtctcttcacgctatccgcccagcaggagatggagaagctccgtgtgggggtcgtccattccatggcaaagtagcatgaacttgttgagctctgctctaagaccaaacgacttgagagtgaggtgacccaactacattctaagggcgaatgtgcctgggtcgaagccaatcaccttcatgtagaggagacccaactccagggggccttcatgaggtgagcttccgggtcagcgaggccgagtcatcccttggtaaggccaacgtccacctggagaggacaaatgcagagctttcgtgagagcacgacgctacagggggtgggtccctttctcactcttgtacctttttgtctttggttgatttatccttccttcctcctcagagctctggaagatgttttctcgggctgatgacgccaagagaacaacataggaggtgaaggcaacaattgtggcctaggtgcgagagctttcgcttgctggcgatgacgccattctcgtattggccgagacggtcactgcactcttcgagcagagcacgggctttaggagttccgcctggtcgttggcaaggtgtgcgccttgcttttgtcgtcgcctctaatcgaggtgcccttggtcgactggttgcggtcgcttcctggccatgtggagcatgtcatcgttgagggtgtgttccatgggagcgacctagctcttgggtaggtggtctcttactttgatgagatctacgttgttgtgatcgccgaaggcttcgccttgggccaaattgacgaggagctagactctattaaagatcaagtccacacttacgctagattgctcgccgaacgggtggatgtgaagcccctgctgactggcccctgaagtctagcatcgcccgctagtgacctgcccactagcgccaaggtcgcttcttgtttttgtccctttttgtaataatttccttggatggacaagatctccacatgacatgttatttccgcttcaaaactttcgccctttggattccggtctcaatgcctttttcggagtccacggatcattgtggtagtggtttcttctatgttagttggctggcgtgatcttcggtaggtgtagatccttttacttgcttcctgcggggcgtggcggcctaatcgccttggtgacttggtcatgacacttcgatcgaaaacatagtctggggcattggtacttaggtcggggaaaactaatcttctgtttggtggggtcttacgagggcaaagcgattgatgtgaatcttttgatcttcattgatttctctcttagcagatacagggtttgcgattcatatttgattgaatctgccttttcttacaaaacctatatgctaaaaattcccacacacgggcttccccttgcctcccttttgcctagtaatgatccgatctacgcgcgcttggcgatgtccacgacgctggctggtgtgcctgcctcaccgccatggtccttagagacaggctcctagagatcgatcaacgtggatgcgagctcgcaatttgctcatttgcatgtgtacgccatcttgatagacgtggaggctgtgatgatcctgtctcttatacacatctccgagcccacgagacgg

SEQ ID NO: 541 - DNA, 1087 bp, Zea mays
  source 1..1087: mol_type = unassigned DNA
cctgtttgaactttagcttcagatattaaacacaaaatataatatgaataatgctcctactgcccgtcataatgtgtttgatttattatgattatcttatttaggtaatgaaatttacaccaaatttattacataggatattgtttggggtgtgtaatcaatttaaagatatatcccgaagttcatattcatttattttgattgaaatcattttccagtgtctaatcttcattaagacctgttttgaccaacattattttattataatcattctctttagagagcggtggattctaaagttcaattatttatcaaaggcacttattttgtatagtgtgataaaaaaattacaaagaatttcctcaaatcccaagttaggattttgggtgttacatgaagacgcgaagccaagtgtgcggacgcttacctatgggtctggccatctggggggcagtgtgccattttattttcatgcatcaataatttgcatggacaataacatgtgttcatttccatattctaggcaggtgcaaagggtctcctttttgcagtacacattttcatatcgaatttgtaagtgaggcttctaatgtcgaagtaaaaaccaattctaggtttttgtgctagatgcattaattcttggaatgatcaaaccaagcaccatgccagggaatggtttaggatatgcttgggaatgggtatacatttgtgctttcaaggtaccgaactgagtctcattcctcttttattccttttttttaagaatggtataaaatgcactaaagtgactcagttgctatgcccaaccattttgattgcgctcgacattcctttttgtggttcattccctggaccatctgatggtgtagtagaaagtggacatatttgggtttctctgggtcatgctgctgaagcagggctgcaactcttaatctgctctcctacaccaatcttcggcaaagaggccatggagttgcatagaggagaatcaggctcgaaggtaattgttgcttgatatccttctacgtacaatggatagagggaagcctctccccaaggagtagctatagtactcctagaatcatca

SEQ ID NO: 542 - DNA, 1646 bp, Zea mays
  source 1..1646: mol_type = unassigned DNA
actattatagtacggacccaacaaatctgagggggcacaatgttttttccagtcgagggtttcgccgatttccaatttggaaatccattcctattttggtaccgctgtccaggttttgatttttcaatgtagtttctccagatttttttgtttttgtatacagggtttgaggtgcaattattactggattatgcataccgtacatttctagatgaaaacatttatctgcaggtttttttatttgttttcagaaaacaacatgttgcggcgaggtgacgatactatgatttttgtttattcgcaatatacttttgtgagcaaacgatttttgtaggcatattatcatgtacatagtatactctttaagtaatgtaatatacatgcattttcagttattaccgatcagtaatacgtgtaacattcaatagtaacctcaaacatgcaacaaacagataatatagtttttttactttttgaaattactttcatatgtcgaccagcaataatatgtttatatatattctttgttgtctgaatttgttttattagtatagttagtaacaacgtcgaatactcagtaataagatccaacagtcaacaaccagatagtatatttttctttaattcctttttaattcacttacgtttggagtcagtaataactccaaacatttagtaacaaacgttgaacataagtaatatgattttctttgttcgactggatttgttgagtgtagtctcagtaacgtcaaacaatcaatttttttcaattccttttgaattcactcacgtttggagtcagcaataactccgaatattcattaataacgtcggacatcagtaatatatgcatatgtagaacgtctaagtgttagcaataatatagtttaattggtaacattctaatatatagtagtatattatggacagatagtagcctttttcttgaagttagcagagttagtaatatagggggtacatatttttttcctttgtatctgaaattttttacgtttcactgtcgcagacaatgtctacatccactgagcagaagcatgggtactacgttacaatgagatgtgctccatatgcattgaagaacgcaacattgttgatgtctcataggctaaaagaaatgataaagaagctaggcttcggttcattactacaaatgaacattgaatcaattaaggatgggatgttcgtcggtctcctgttgtctagtgtgtacgactctcttctacggatcaaatttggtggacgacccttgccaataacaatagaggctattcaaattgctactatattaccaaggggagaagacaagtttcctcagctggactactagtccacgacttctgctagaactagttttaggtcagtaacaataacacccattatttttgttattttccatttttagtagccacatgttcaataatttttttattattttgttatgtatataaaattatgcgaggaaaatggaatgattaagatattcacagatgatcatgcaaaaggaaataaatgtgtataacaagcttaacttgatggaggtcacttgttgggttgttgaaggaatgaacaatgaccacgcaaaacatgggtacgactggattttacaatgtttgtttgtacttgca

SEQ ID NO: 543 - DNA, 644 bp, Zea mays
  source 1..644: mol_type = unassigned DNA
caaaggttagcaataagccaacaggacaaagctataacaaaacaaaggtaaattatatcacagcgcaacaaccttctaaatgtttctctaccaggcactacaaatattacaaatatatcgaatgtttttcatacatcaaatttatatggcctaaactttgcttcctcataaagttgctcacatatcttccagattatatcatctgcagccttctttgcctgtgccacggccacaacttcggcttggagcgcagcgtcttcagcttcgtcctcaatacgttttacttcaattattacctgcaaagtagaaacttccgactaaattttagaaagcggatccacaatacatgcataaacaacgttgataaaagaaacaagggaaaaaagcaccttcggcctttttctgctgaagactcctcctgatgctggcagccttttccgccgctttccgaagctgcaaaagagtcgaactcacacacatttgactaatataatggaaataatcagaaaaggaaggtagccgctcaaaaaccttttcaccgttcttggccatttcttcagtgctaatatctttgccgcccttggaccatatatcagataggaattttttgccccactccgatgcctcagctatagattttcgaa

SEQ ID NO: 544 - DNA, 577 bp, Zea mays
  source 1..577: mol_type = unassigned DNA
ttcgtatccaaggcctccttgagcttgtccttttctttagtaagactctgagcttcggttcggctctcaaggaggtcgctcttcaaaactaaagattcttctttttcattgcactcattccgaagcctggacacttcggacctcagtttcaaaatttctttttgggcagcttcgccctcaatgttctttctattttttagagttttgctcaaaatcaagccctgcaaagttggaaaagatagtgaaaatcatattgcataacagacaaacccgaccagcaaaaaaaacaatgcaaattatacctttaaatgtgtgtatgcaaggcagtcagaaaaatcgtcaaagggcatcagcgatagcccagcctcaagtttagggaaaccaatgtccgccatgtagcgacacacatcagtctccaaattatcagggcagcacaacagatagttgtcttgccctccaccgaagatcgtggcccccggagggtacccaagttcttcagcaaagccatacgcttcggccagttgcttagcgcccatagtttttccggccgcctggtgaatcctatattttcgacctc

SEQ ID NO: 545 - DNA, 619 bp, Zea mays
  source 1..619: mol_type = unassigned DNA
cctttttggcctcctcaatctctgcaggacctttccccttgtcctcgacaatcgcaggcttcgaagaaccaatcttctcttcggccaccgctatgactgaaggtgtcacagctggcaagggtgattgggccatcgggctttctggccttggcgcattcgcgccatgagatgcttcggtctctgtagcaaaaaccttcgcaacactatcctcatcatcttcgtcttcaaaaagagagctcatcacaggagctatgcgcacaatgtcctcttcatcgctgtccgacaaagaatcattaatctcaagctccattccagccacattcctcgccttcgtctcctcggattctgaagcgaagtcttcccagtcttccgatgtcatggcaaccacgacagttccttcagcggtgggcaggcttgtaccttcgggcacagcctaaaaaagaaaaaaaacttagcacaatacatttaaacaaaatatatataacataacttggaaaactttttcataccgacagagccgtggacaagttgtcgcggccgcttctatagtgtcacctaaatactagtgactccagcgtaactggactggccacagttaggccgcaaatgtaatcacact

SEQ ID NO: 546 - DNA, 2890 bp, Zea mays
  source 1..2890: mol_type = unassigned DNA
atcctcaatagtacataataacatgcaatgcaagttgatacaaaagccaaaccaaaagatatagtaaatagactaaaataaaaactagtatataaggtcaaaagcttccctctaaaaaatgaagctaacacccaacactctacacaagcaagcaactcttcactagtgtgaagtcatatcttgtaatatatgtgaaatatattcttttttgcttcaccccgttccttgtactacttagccatagtcccttaagattgcaaggtgatggccttgttcataccatggtcccaaacataatggccctagatcatgaggtttttgttaggtttgatgacctttgtaagggaagtagattctctccatgttttaagcggcttatggacctaagagccaagagttaaggcggagtaggttttggagcccttggttctataggggccctgaaggggtcctctctcttggtcccaaagttgttgtgggagggggaaacagggcgacaaccatagttgtattcaggacccttggcaccacaagggtcctagatgtgatgtgtcatagtcctcttaagattcatttatcttgagatctagggaccttgataacacaaggggcccggttaggacttgtatgacacctagggtaacaaaatccctaaggccctaggggagaagctcaccatgccttctagaatgatttgagttattcttgcctacaatcttagaaaaaatgataaagtttagcttgttgggggcatccttacactatatttagctatgtattctcaattttttcctaaatcctttttggcccccctaattgatgtcttaggaatgagttgtgaaccaacatgtcctaactaattaagtggtagcatagtggaagggtagataggtcaagaagagcgacccaccatggaatagcggacctacaccatggtttagcttttgccagggtattgtgtttatgcatctttgcccatccatttagcattagagcatgctcccatacaccaaatcaacttgacttaccaaacagttcaccgactttattgaatagaaggtcaattgtgttttagtgtaaggattggacccctaaagaatgattgaaaaactttaaggatagtttttattaaataaatattgcttaaaccgtgagtgagtacttatggatatgccaccccttgcttgtggggctagagtgttaaccccacaagggccccaaagaaggagctccttaaagttaggattcttagggcagatgaaaaatcattcattcgccaatccttggagaaggcgataaaatattacctaattaggggacttatttacatcatacttagcaaattcctatatttaactcctaaaacctttttgaggccctagtttatgcttcaagagggtggcatgataatcaatagaccctgactaagcggtggcacagagaaaggatggtctaggatagaaagggtgacccaccatggcagagcaaatctatactagggctttgttgtttctaggtaatgcctattggcatatttgttggaccacacaatatatatctatcatacatcactacatcctagtttgccaagggtcgcaccgactctattaaataggaggctagaaggaaccacatatgagtgtaaaatatagttaggaaccctgaaggggtataaccaaaaaaagttggaaggtattttctataataattatgtgtataatagtcctgaccatagggaagcttcctagtaggacatgctcatgttcctgcaataactcaatgagtgtaaatttttccgtgtcaggggccacacatataccatactcaacctatttccttaagacaactcttgaaattgccttagtgcctagaagacaatatagggaaattgtgtaatctactaggcatgtctcgtaccaagggacaatgcaaatgagaggatggctaggcttagagagtggcaacccaccatggaagagttgattcataccatgacttagccgttcttagggctacacctctaggcctcatggtgaaagttttgaaaacacatccattgcatccgacaatggactatctgatgcatctcatagaggaccatccactgcatctcacagaggaccatccaccacatctcatagtggacacatcaccaagtcacatggtgaagtattagagtttttagttcattttcaagatcttgtctattttactgtgaccagtgtgaggatggttcatatgcaaaaacatataaaacagaaaaagtacagagtaatcaaaaaaagaaaaaacatggatggacattatttttaaagtgtgtaaaatatatccgggggacgtggcgtcactgttgtaatgacattcagcacgctcactcaaaactttcaatgacacacttagtgacacttactcaacacattcagtgctcacgaacgacaaagtgttggtacaactgtatttatagagaagacacccaaccaggaagcggtactgaatacttaacatttagtattagttctataaaagaattagtgcttatctaattctggtgggaatcctatttggggtggcgagaaatgaagatacctttcagtatcggttcttaccaaaaacttgtactagagttgtctctactttttgagccaactgttggttttttagtaatggttagtgtttccaacaggtactaaattagttaatattagcaccggttgtggacaacaaccggtactaatatattttgcatggatcttcaaatttaaaatcgacactgaagctaatacaaataacgattttaaatcaacctaaacaaaagttgttggattgatgccccattctctagtaatgttaaaatgatactaaaaactcaacacatagcctactataaaat

SEQ ID NO: 547 - DNA, 2660 bp, Zea mays
  source 1..2660: mol_type = unassigned DNA
taacttgtgttttgtggaacgctgtttaacgccatcctgattcagggtgagctcatctggaaaataagaatattactgttagcaaagcactgaattgtttaatccttcggtactgttgttctgtcattccaaatggtcgtgccctagcccctctgattttatggttatctaacaattctattcagtaaacaaattctgcaagactgaaaatggacatgaaaaatgaggctattatgactggagtactagtgttcagtgtcacaatataagtgctatgctaaattcagctcgcaaaggtgttaaacctgcagctccattagtttagctcctgatttattttttcaaatgttttttttcattttcaaccatttgtacagattttagtgaaatccggtgtattttctcattttgatttattttaaacttgcattccttttatgacgggatgtaaatttgatagcagaagatatgtgaatgagtatcacaaggttgctacttgtattaacttgctatttctttcagcgatgcaatgcaaaagtttctgattttctgaaggtggacaaacatgctgaaacattcacagttcagtctgcagagaattttttctgctcttagcgtcaagcaaattccacttcctttttgtaagtacaaatcccactttgtgaagtttgcctaaaagtaaaactgagagagtttggggcagctgccttgcttggatgggcatttggtttaaccatcaatctataaaacagtgtgcctgttctcttattgctgtactctccggaattcattttggtgctcgttctttttgtaacaagctaaacaatggaattgccctaaaggatagaagccttattaggtttgacaggaatttgattgacatgtttacgctacatgaacttttgcaacagtgtacacagaagaggtccctcttggttgggaaaggctgccatggtttagccatccatttgggtttggtaactgatactgtcacatgcaatattctcatcaacttgtatacaaaatgtggtaggaatgattgcgctcgccatgtttttgactcaatgtctttcagaagcatagtctcatggaataccatgattgctgggtatacctgcaatggagatggtttacaggctctgaagcttttttcaaagatgcaccaagaagggacacagatgagtgaatttaccctgtccagcaccctatgtgcatgtgctgcagaatgtgctactatagaatgcagacaattacatgctatagcaatgaagcttgcattggactcaaatagttttgttggaactgctgttcttgatgtttatgcgaagtgtaatatgattaatgatgcctgtttggtttttgagaagattcctgagaaaactgcagttacatggagtacattgtttgtaggactcatgcaaaatggtcttcacgaagatgcattacgtctattccagggttcacaaagggaagggatacaattgactgaattcactctttctgctatactcagtacatgtgcaagcctagcattgatgattgaaggaatgcagctgcatgcagatgttatcaagtatggttttaataacaatttgtttgtggcatcatctcttgtggatgtttatgcaaggtgtgggcagattgagaaagcctatctagtatttgctgacatgaaacacaagaatgttgtcctgtggaatgcaatgataactagttttactaggcatggtaaatctttggaagcaatgattctctttgagaaaatgcagcagtcagggatatctccaaatgaagttacttatgtctccatgatgtcggtgtgtggtcatgcaggtttagttgaagaggcccgatgctactttgatctgctggttactgatcagactgttaaacctaatattgttcactattcttgcatggttgatgttttggggcgatctgggaagactgatgaggcttgggaactgattcaacaaatgccatttgaaccaactccttctatgtggggatctttgcttggttcatgccgtaagtacaggaatgtcggaatagccagactagcagctgaacagcttttcaaacttgaaccagaaaatggtgggaaccatgctttgctttcggatgtatatgctgccagcggaagctgggagaatgctgtgttggcaaggaagtatttgaatgatactggtgcaaggaaagatacagcctcaagttggatgtaggcaaagccgcaaaggttaattctcatattattgtttatgagcaaaaagaggagctgtttgtgcagactatcatttaactatttaagtacagcccatgttcttatgtggacttctggtaattgagaactaaatgaggaatagcaagcatttatccgtgactctccaacgctcttacacactcatcatatattaaattgttgccatgtggtagtggcagtgtggcacgctgcacaggaggtaaatgtcagcacttctactgttaacattgtcagtgaagtcaatagtattaatgtcatgctcctggccccatctagtgtaatatcaacactatcatttgaatgttaattataagagtaggtagtgtcaagggcggacctaggtagagactagtgagggacaggccaccgctcaattctctgttgtaagtagtagagcata

SEQ ID NO: 548 - DNA, 1293 bp, Zea mays
  source 1..1293: mol_type = unassigned DNA
aattcataaaacatattcacgttcttgcttctatagcacaaatgtttgcatctagatctttcactctttttgttgtagtttacatatgtttcatcaggttttgtttctgtttgccaaatgccggcgagatgtgatccatcgtttcagttttataagcacgaatttgtacttcttgcatggcagactagacattaattagtcttctctagtgtaccctatagtaataatgagcgtataacattagctataaatagcgttagagtacttccggtagtactattccggtcaccattggcactactccagacctaagtagagttaggatctaccttgacagcatcatatttgtcatgttaagctctacatgtctcaacacttctcatgcccaaactgatgaaaaggtacagtgcaaaaggagccaacagcacattattggtggtgattaaaggtgtcagcagaaagccagcagcacattggtggtgtagagcagcagaagtatagtagaatgagttcaccctttccattgtatttatacacctcgagaaggtgctcaaagacagacagacagacccttgactggaggagtgatacattcattttgctgaagaaatgtggttatggcgcctgaccttatgtcgtcagtgccagggccctacactagtacactcctactgcaattttaatttcacccataaatttatattttccccatacatatctcaataccaaacatgaataatctgggatagagatgtatggagaaaaacaaacttatattctataatgaaaaacaaacttatacctttagtactttaaaacaccaatttcctgtgtggtacgttttctcttaacgagctattacactacagataggttctaaaatgagaagtgtgattttcaacgtatttgtccatgaatttcgaaagttacattattccatccactcttttcgtgtgcagcataacgacattgtgctacaatgtttacgacctgctaaataacaataatagcataaatagttgattatgttagtcgtccagctaatcaagtcggtgaccccgccgctacaaactgcatgcagaagcagcgatacttcacgatgcttcctaatctaagttgataatggatacaaaacatgtggtttagacaaatattgcacaaaggagtggcctctgctagtgctagcagtgctattggggttttattgtgaggcaccgatgccttttttttgtgagaatggtacaaaccagagtattgactacattgatgttgtcgacctacctgtcatttagt

SEQ ID NO: 549 - DNA, 515 bp, Zea mays
  source 1..515: mol_type = unassigned DNA
acacaatgaccactgacaaaataaaataaatgacgacatcctcaagtacatgagtaaaatgagcaacaatacaaacaaacacggtacaggagaaatcactaaacatgaaaacatactacataacaacagccgtccgattagtttctacggcccagattagatggacgtgggtcatgaatcgttacgcgggtgcagccattgttttggattaaaattccgatggccccgagacatccctgccccgatccaaccgaggccatcggattggcatccagcggtcacattttaatacgacgaaatgctacgcgccgcatgatctcagtcgttcatcacttttcctacggcgctggttccatcacctacctctcgtatcgaacacggaagcgcgagcagtccgcgtggcagagctcgccgatgagcgacgtgcatgacgccgatcaggccgaagccgaaccctatggatgactcgctctacgcgtcaaggactcacaagcgcgaaagagacgtgtcacacg

SEQ ID NO: 550 - DNA, 536 bp, Zea mays
  source 1..536: mol_type = unassigned DNA
tgtgtcggtactttacttatgccccggccgtggctaggatctcggagcgcctccacgttcaacgacggtttcgcgttctgttgcgccggcgcgagaggatagggctgatgagctggccctacacgtcagcgtccgggatcaacacacgcgtgcgcgtgcgggctgaccagcggggaccaccacacatcgacccaggcgagagctcctcctgtgctctgacgcagctgaggctgaggagtgggcctaggtcgccggcgtcgaggcgcgcgtggatgtagtgcgccacgcgattcgggtggagtgggtcggccagtgggaaacgaccgatgcggcgttttaggttttgcttttccttttctgttttatttttaaatctcaaattttaattcaaaatttgttgtgaatttcacacttggatcaaatgctcaaatcaagataccagcatgaagaagtatttttattattttatatatattctttctagttatcaagaaatttattaacttgtatgtgtatatatttatatatgcatgtgt

SEQ ID NO: 551 - DNA, 750 bp, Zea mays
  source 1..750: mol_type = unassigned DNA
atggaacacggtggagaggtcgcgcacgacggggaagaaggcgcagcgtgctgacgccaacggtgcagcgggagacgggagcctgcgcatggtgggcgtcatcttcgtctgcggccgcggaggcgcccacgccggcttccgcggcaccgacgttcactcggtcggcgcccctggacgaaaacacatatgcatcagagaggaagagggggagcacggcaagaaggaaccgcgcgactgcaggaaacgatgtataactcaaaaaaatatatcaaaagggactcgtaagcgaaagaaaccagatctgccccacaaggaaagattttggtgcaataggcaaacaaacctctttccgagcaacaatcggagcgggcgatgaaggcgacaatacaggaggcggcggagccgacaatgaaagggatttgaagtaaaaagtgctgggaaaaggatgacacagaaaagatgaatgaaagcacgcaaagcgactgggagagtgacgacgtgaatcgagtgagaaggaagaaagatggggcggaaagagcgaagataggcatccaccggccaagcatatcaaacggaagtatccagagacagaaatatcgagagacggagggagcagaggagcgatttgagccgtccaccgatgatcggacggctaaaatttttttaaatgacgtggatagcacaccgttttggaccagcttttataggtagctgcttcctagtcgcgacgattggagcccgctgccctgg

SEQ ID NO: 552-553 - skipped (2 entries)

SEQ ID NO: 554 - DNA, 1000 bp, Glycine max
  source 1..1000: mol_type = unassigned DNA
gtttattttagtatttagtggcctataacaattttgtccttaaaaattatctttgataaattaaaaaatagtatttatgaattattacttttgatctttttctaagctcaaagttgactgacatttttttagagatatcacatgtaaaatattattagcttcaatgtttgatggtctgtgacagttttattcatacctcaataaatcaagagataagcgtctataaattatcttccaccttaggtgatataagatttttagtgtacctaaacatgtacattaaagatatagtttaccttttgatagaataaaatattatcattttcacgtgaagatgaattttgataattaaattttgggtaaaatgactacatgttcaagatattgtttttgcattcttaattatcaacgacgaggtacttctcatgctgtcaggtttttgttgtcaaatgtagcagttaccacttttcaacattcttagttaacaactctttactaaatgccatcgtcaaaacacatagttatatatgtacatatataattcgccgataaaaataatgtacatagttcaaaacaagtccttatccaagtcacaataatcgttggcacgtatatttatttatttataactactaagaatggtaaaacttgccatcgcatactgttttgccaaagttcttattaggtggtttttaactttttatatgatgcacttgatcaatagataattgttcagtcaaagaaagggaaattaatgaacaaattaaagataataaattttataagcatacttactatgaccacatacttatccgtttccacagtatatatatatctatgtatattggttctcctccatcatcagcaatgacaatgaaactatattgaaatatatcccctttgttcattgaaaagttgaaaaactcttaattttgatcgtatgaacatcattaccatcgttgtcaatttcatcattagtctcaacctctcagccgttata

SEQ ID NO: 555 - DNA, 20 bp, Zea mays
  source 1..20: mol_type = unassigned DNA
gctaccgtgcgtaatccagg

SEQ ID NO: 556 - DNA, 109 bp, Zea mays
  source 1..109: mol_type = unassigned DNA
acgttggatctcctatcataacgtttggtttgctaccgtgcgtaatccaggtgggtctcaaactcatctccttaatgcattatctatcatgtttcaagataaacctttc
